United States Patent Application Publication US 2006/0107345 A1 - sequence listing, part 10

SEQ ID NO: 40134 - DNA, 989 bp, Zea mays subsp. mays
acgagtacgagctcgtcgtcaccacctactcaggtctgtaccgctaccgcgtgggcgacgtgctgcgcgtggccgggttcaagaaccaggcgcccatgttcaagttcctgcggcggaagaacgtggtgctgagcatcgactccgacaagaccgacgaggcggagcttcacgcggcggtgagcggcgcggtgcagcacctggcgccgttcggcgcgtcgctggtggagtacacgagctacgcggacgcggggaccatcccgggccactacgtgctgttctgggagctgcggctccgcgcgggggacgtgccggtgccggtgccggcgtcggtgttcgaggactgctgcctggccgtggaggaggccctgaacagcgtgtaccggcagggccgcgccgccgaccgctccatcgggccgctggagatccgggtggtgtcggacggcacgttcgacaggctcatggactacgcgctcgcccgcggcgcctccatcaaccagtacaaggtgccgcggtgcgtgcacccgggccccgtggtggagctgctggacgggcgggtgcaggccagctacgtgagccccaagtgccccaagtggagccccggcggcggtaagcagtggagcagcgacgccgccgccaagaagcccgccgccgccgccggcagcaataatggaggaggggcggtcgtcgcctgatcgtcgtccgtcgagatatactagtgaactttaattaattagctggctaattccggaaccgtcgttgttgttcgtgggagagagagactcgatcttgtggtcgatcgattgtgatagctgatctatccgtgtgcatgtatgcatgcatggctacgatcgaatgattatctagctgggtaatcatcgggtgtgtggtagcttattaagtattgtacgcgtcgtgatatcatgtgagctagcttttgtttctttttattttcttttatgtggttttgtaataaagtttgagtacgtagt

SEQ ID NO: 40135 - protein, 229 aa, Zea mays subsp. mays
EYELVVTTYSGLYRYRVGDVLRVAGFKNQAPMFKFLRRKNVVLSIDSDKTDEAELHAAVSGAVQHLAPFGASLVEYTSYADAGTIPGHYVLFWELRLRAGDVPVPVPASVFEDCCLAVEEALNSVYRQGRAADRSIGPLEIRVVSDGTFDRLMDYALARGASINQYKVPRCVHPGPVVELLDGRVQASYVSPKCPKWSPGGGKQWSSDAAAKKPAAAAGSNNGGGAVVA

SEQ ID NO: 40136 - protein, 202 aa, Zea mays subsp. mays
RVRARRHHLLRSVPLPRGRRAARGRVQEPGAHVQVPAAEERGAEHRLRQDRRGGASRGGERRGAAPGAVRRVAGGVHELRGRGDHPGPLRAVLGAAAPRGGRAGAGAGVGVRGLLPGRGGGPEQRVPAGPRRRPLHRAAGDPGGVGRHVRQAHGLRARPRRLHQPVQGAAVRAPGPRGGAAGRAGAGQLREPQVPQVEPRRR

SEQ ID NO: 40137 - protein, 198 aa, Zea mays subsp. mays
MFKFLRRKNVVLSIDSDKTDEAELHAAVSGAVQHLAPFGASLVEYTSYADAGTIPGHYVLFWELRLRAGDVPVPVPASVFEDCCLAVEEALNSVYRQGRAADRSIGPLEIRVVSDGTFDRLMDYALARGASINQYKVPRCVHPGPVVELLDGRVQASYVSPKCPKWSPGGGKQWSSDAAAKKPAAAAGSNNGGGAVVA

SEQ ID NO: 40138 - DNA, 1017 bp, Zea mays subsp. mays
taaattaaaggagcacttctcatcgtacgggaaggtggttgagcatcagattatgcttgatcatagcactggacgttcacggggctttggatttgtcacatttgaaagcgaggatgctgttgaaagggttatgtcagaggggagaatgcatgatcttggagggaagcaggttgaaattaagaaagctgaaccaaagaaacctggcgctggtgattcaagctcaaacggaagacacagccgtggtggtggtcatcgtgattcataccgtggtagtggtgtttctgtgaacagcggtggcggctatggatatggtggtggttaccgatcagctgctgcagcatattatggcagcacagcatatggtgcctatggcagagggtatggatatggtgctacttctggctatggctcaggttatggctctgcatatggtggctccatgtatggaggtccatatggtgcctacgggtcatatggtggtgcctatggaggtggtgcgtatggtgctccaggagggtatggtgggggaggatatggcagctacggtggtgctggaggcatgggtgggggtggcagcgctggtggtcggggctccagcagataccacccttatgggaaatgatcatccattctgtgtttctctaggatctgataataaagccatacctttcctcgtttctgctactgagaaaatggaacatcccattcgtcttgttgaatcagcggcatctggacatttttttccttggaacttgcattgcacatcaaagattctatagtctatagtcgctgaaccctgaaccgcccccaccccgagctttctgtagaagctgcagctgaaattctcgtagtctggcatgagccttagaatgcccttgaaactattatctttgtggttaacattatggtgtcatggaacagatgtacgttgttgtaacattcactcactgatcagagacttgctatctctgcatatgtggagagaagctttgcaaatgattgactgatactattaat

SEQ ID NO: 40139 - protein, 206 aa, Zea mays subsp. mays
KLKEHFSSYGKVVEHQIMLDHSTGRSRGFGFVTFESEDAVERVMSEGRMHDLGGKQVEIKKAEPKKPGAGDSSSNGRHSRGGGHRDSYRGSGVSVNSGGGYGYGGGYRSAAAAYYGSTAYGAYGRGYGYGATSGYGSGYGSAYGGSMYGGPYGAYGSYGGAYGGGAYGAPGGYGGGGYGSYGGAGGMGGGGSAGGRGSSRYHPYGK

SEQ ID NO: 40140 - protein, 189 aa, Zea mays subsp. mays
MLDHSTGRSRGFGFVTFESEDAVERVMSEGRMHDLGGKQVEIKKAEPKKPGAGDSSSNGRHSRGGGHRDSYRGSGVSVNSGGGYGYGGGYRSAAAAYYGSTAYGAYGRGYGYGATSGYGSGYGSAYGGSMYGGPYGAYGSYGGAYGGGAYGAPGGYGGGGYGSYGGAGGMGGGGSAGGRGSSRYHPYGK

SEQ ID NO: 40141 - protein, 163 aa, Zea mays subsp. mays
MSEGRMHDLGGKQVEIKKAEPKKPGAGDSSSNGRHSRGGGHRDSYRGSGVSVNSGGGYGYGGGYRSAAAAYYGSTAYGAYGRGYGYGATSGYGSGYGSAYGGSMYGGPYGAYGSYGGAYGGGAYGAPGGYGGGGYGSYGGAGGMGGGGSAGGRGSSRYHPYGK

SEQ ID NO: 40142 - protein, 158 aa, Zea mays subsp. mays
MDMVVVTDQLLQHIMAAQHMVPMAEGMDMVLLLAMAQVMALHMVAPCMEVHMVPTGHMVVPMEVVRMVLQEGMVGEDMAATVVLEAWVGVAALVVGAPADTTLMGNDHPFCVSLGSDNKAIPFLVSATEKMEHPIRLVESAASGHFFPWNLHCTSKIL

SEQ ID NO: 40143 - DNA, 905 bp, Zea mays subsp. mays
atatagggcaccaaccatttcatcctctccgactccgacatcgtccggtccgatacgccacaggatcgaccaccaatgcagactgccgtggcggtgctgttatcaggcgtggtggcgctgttcggagtgacgagcgccgtgctggcgttcatagccgaggcaaagaggctcacagcggatgaaatccgcgtgtcaggtcgcgagtgcgtgtacccggccaacgccgctcacacgctggggatatgcgccatcttcctgcttgccgcggcccagatcatcgcctcggtggccggtggctgctgcggctgctgcaggccaccgggcggcggcggtccttctcccagtcccagctccactaggcgacgcgtcgtgggagtcatcgcctctgtcctctcatgggtagcggcggcgattgctgtggtctacgactgggtgggcgcggcgctgaacgcgcccgtgacgcgcgaagccaggctcgcgggctccgacgaggagtgctacctactcaggggcggcatcttcgtcagggcggccgtgctcagcctcgtcgccacctcgcttgggatcatgtcctgcatcttgctccgcctgccgccgccggctacgcacgcgccggaacaaggccaccgcgcggtcgggctgccgcagtggcccgcgcaagagacgtacccgtaccccgcgcacgggtacgcccacgcatcggaccccaagttcgctcctcctgctcctcacggtcaggcgaacgagcaagtgtacgtgtagtgcgtagatgacgtgatgagtagtgatggtgtgatctccgtattattttttccttttgttttgtacgtaggtaatatgtgcgtcgtgattactagtgatggtgtgctctctgtattaattttttcttttattgttagtttgcc

SEQ ID NO: 40144 - protein, 228 aa, Zea mays subsp. mays
MQTAVAVLLSGVVALFGVTSAVLAFIAEAKRLTADEIRVSGRECVYPANAAHTLGICAIFLLAAAQIIASVAGGCCGCCRPPGGGGPSPSPSSTRRRVVGVIASVLSWVAAAIAVVYDWVGAALNAPVTREARLAGSDEECYLLRGGIFVRAAVLSLVATSLGIMSCILLRLPPPATHAPEQGHRAVGLPQWPAQETYPYPAHGYAHASDPKFAPPAPHGQANEQVYV

SEQ ID NO: 40145 - protein, 125 aa, Zea mays subsp. mays
MGSGGDCCGLRLGGRGAERARDARSQARGLRRGVLPTQGRHLRQGGRAQPRRHLAWDHVLHLAPPAAAGYARAGTRPPRGRAAAVARARDVPVPRARVRPRIGPQVRSSCSSRSGERASVRVVRR

SEQ ID NO: 40146 - DNA, 898 bp, Zea mays subsp. mays
acttggacataacgcaacgcccgccgcgaaaagcactaccggcctgtgctgctgtggtagttagtttcaagcagcaatggaagccgtggtggccacgacgacaacgagggtgtccttccctctgctgcccaccgcggggaggcccctgctcccgccggtcctggcgcggccccgccgcggcttcgcctccgtctccgccacctccacatccggcgcaggcggcggcggggggcgctcatctgcaggcggctgcggcggcgacggtggaggggacgactccggtgccggcgcagccgcggccgccgcggctgtggcggctctgggtgagtccgagcagcaggaggacggcgactctgacgcaatcgtgctccatgtcgggggaatgacgtgcggcggatgtgcggacaaggtgaagcgaattctggagagccagcctgaggttgctgcagctacagttgatgtcgaaaaggccaccgctattgtgtggacgacacctgaagcgaaggctaccaaagactggcaaaaacaattggccgagaaacttgccaaccatctcacctcttgcgggttccagtctcatctgcaagacgaaggcgaggctgaacaaactgatgcttaacctcagcagtgcattacgtatgtatgactatgagtggccaggaagttttagcatggagggtccttgcatgaagcaatgtctcccacttcagaagttgttacatgcgggtctacgatgtacttcttttatttatttgtcgcagtttagttcaaaaatgaactcgcaggaagtttttatgccgttatattgttgttaaggacttgtggttgaacttcgaaacagctgaactgttgagtatcgaaggcgaactagcgataaaataaaatgatgaagtatcgc

SEQ ID NO: 40147 - protein, 180 aa, Zea mays subsp. mays
MEAVVATTTTRVSFPLLPTAGRPLLPPVLARPRRGFASVSATSTSGAGGGGGRSSAGGCGGDGGGDDSGAGAAAAAAAVAALGESEQQEDGDSDAIVLHVGGMTCGGCADKVKRILESQPEVAAATVDVEKATAIVWTTPEAKATKDWQKQLAEKLANHLTSCGFQSHLQDEGEAEQTDA

SEQ ID NO: 40148 - protein, 127 aa, Zea mays subsp. mays
LDITQRPPRKALPACAAVVVSFKQQWKPWWPRRQRGCPSLCCPPRGGPCSRRSWRGPAAASPPSPPPPHPAQAAAGGAHLQAAAAATVEGTTPVPAQPRPPRLWRLWVSPSSRRTATLTQSCSMSGE

SEQ ID NO: 40149 - protein, 118 aa, Zea mays subsp. mays
MSKRPPLLCGRHLKRRLPKTGKNNWPRNLPTISPLAGSSLICKTKARLNKLMLNLSSALRMYDYEWPGSFSMEGPCMKQCLPLQKLLHAGLRCTSFIYLSQFSSKMNSQEVFMPLYCC

SEQ ID NO: 40150 - DNA, 804 bp, Zea mays subsp. mays
gcaccaaaaacccaagcctcctctgccacacacacctcgccagcaccacagccaccgccacagtcacacagtcagcgagagagagcatggacctgctgaaccccgagcagatctccgagttccgggaggcgttcgcgttcttcgacaaggacggcgacgggtgcatcacggtggaggagctggcgacggtgatggggtcgctgcaggggcagcggcccagcgcggaggagctgcgcgagatgatccgcgacgccgacgccgacggcaacggcgccatcgacttcgccgagttcctgggcctcatggcgcgcaagaccgcggggggcggcgcccggcggcggcgccgaccccgacgaggagctgcgcgaggcgttcaaggtgttcgacaaggacctgaacgggtacatctccgccaccgagctccgccacgtcatgatcaacctcggcgagaagctcacggacgaggaggtggagcagatgatccgcgaggccgacctcgacggcgacggccaggtcaactacgacgagttcgtcaggatgatgatgctctccgacggcgccggcgccggcgccgcagccacgggccaccaccaatgaacccatctccacctttcatcagcctagcgcttcccatcacgtcccttgccgatggagtggcggatcactccatccgtctctgcttcccttttctttttcaccccctcaaaaaaaaaaaaaaaagatcagcgtccgtctctctaatgtaacgtacgtaatgtaatgtaactgatcaaatattcaacaagaaatttaattaccgaatgg

SEQ ID NO: 40151 - protein, 247 aa, Zea mays subsp. mays
TKNPSLLCHTHLASTTATATVTQSARESMDLLNPEQISEFREAFAFFDKDGDGCITVEELATVMGSLQGQRPSAEELREMIRDADADGNGAIDFAEFLGLMARKTAGGGARRRRRPRRGAARGVQGVRQGPERVHLRHRAPPRHDQPRREAHGRGGGADDPRGRPRRRRPGQLRRVRQDDDALRRRRRRRRSHGPPPMNPSPPFISLALPITSLADGVADHSIRLCFPFLFHPLKKKKKRSASVSLM

SEQ ID NO: 40152 - protein, 219 aa, Zea mays subsp. mays
MDLLNPEQISEFREAFAFFDKDGDGCITVEELATVMGSLQGQRPSAEELREMIRDADADGNGAIDFAEFLGLMARKTAGGGARRRRRPRRGAARGVQGVRQGPERVHLRHRAPPRHDQPRREAHGRGGGADDPRGRPRRRRPGQLRRVRQDDDALRRRRRRRRSHGPPPMNPSPPFISLALPITSLADGVADHSIRLCFPFLFHPLKKKKKRSASVSLM

SEQ ID NO: 40153 - protein, 184 aa, Zea mays subsp. mays
MGSLQGQRPSAEELREMIRDADADGNGAIDFAEFLGLMARKTAGGGARRRRRPRRGAARGVQGVRQGPERVHLRHRAPPRHDQPRREAHGRGGGADDPRGRPRRRRPGQLRRVRQDDDALRRRRRRRRSHGPPPMNPSPPFISLALPITSLADGVADHSIRLCFPFLFHPLKKKKKRSASVSLM

SEQ ID NO: 40154 - DNA, 927 bp, Zea mays subsp. mays
gcctcgtcggtcgtcgtgctgctcagtgctcgtcgtcgtcgcggactgcctctgctcctggtccactcggagacagcggctggcggctggcttccctaagctcgttgccctaatcttttattgggccaacccaaggtattgctcaggcaatactaggccatattgggccctccgcccctggtgcgtggcctactggcctggcggtcgggcgccgtgcggcctggcggagccgcggtccgcggaggcagccaggcgcgcgcggacgcgcgggcaagacgcaggcagcccgcagcccctcgctcgtcgcctcgtcggtcgtcgtgctgctcagtctcgtcgtcgtcgcggactgcctctgctcctggtccactcggagacagcggctggcggctggcttccctaagctcgttgccctaatcttttattgggccaacccaagggagcacttccccatattcttgagaacacaaaggaagattttttcaggaggatcattggtctgctagcagaaacctcagagatatgttacagagaaataaaggacatcaagtgcatcacctgccctcacaagccagaaggttccatgtttgtcatggtgaaattaaatttgtatcttttggaggggattcatgacgatattgatttttgctgcaagctggcaaaagaagagtctgtgattttgtgtccagggagtgttttgggaatggaaaactggatccgcatcactttcgccattgattcatcttctcttcttgatggtcttgagaggatcaaatctttctgccaaaggcataagaagaagaatttgcttaatggccattaactgtatctacgttcaaagttacccagttccattgtttttcatcatatcatcaacaaatgtggaactttgaaatccctctgaattaataaagttttccttgaatg

SEQ ID NO: 40155 - protein, 133 aa, Zea mays subsp. mays
PRRSSCCSVLVVVADCLCSWSTRRQRLAAGFPKLVALIFYWANPRYCSGNTRPYWALRPWCVAYWPGGRAPCGLAEPRSAEAARRARTRGQDAGSPQPLARRLVGRRAAQSRRRRGLPLLLVHSETAAGGWLP

SEQ ID NO: 40156 - protein, 79 aa, Zea mays subsp. mays
MFVMVKLNLYLLEGIHDDIDFCCKLAKEESVILCPGSVLGMENWIRITFAIDSSSLLDGLERIKSFCQRHKKKNLLNGH

SEQ ID NO: 40157 - protein, 76 aa, Zea mays subsp. mays
MVKLNLYLLEGIHDDIDFCCKLAKEESVILCPGSVLGMENWIRITFAIDSSSLLDGLERIKSFCQRHKKKNLLNGH

SEQ ID NO: 40158 - DNA, 838 bp, Zea mays subsp. mays
actacgcggtcttcgctcgctcctcgagttcagtcctcacctccccaccgagctccattaatggcgcctcccctaattttgccataagtgccgagaccacgtggggtctgggaaggaaaggctactgccacttcagaggtcggcctgggaggctgcatcgcatccacatggggtaccagcccatgcacggcaacggcgggacagccggtgccgggacatcaggctccggcggcggcggcggcggagaccacttgcgccaccaccagcagcagcgcctgcacagcccccgcatggccggcggaggctccatgacgcgccgggccagctcgttcaagcgcggcgggggcggcgagatcgagctccagatcggctctccgcgctcgccgaggtgcgacgggttggggagccctccctcggactccgtggagtcgtccggtagcggcctcctcctccaccagagccagcagaaccagcacctccggttccggctcttcaagccgccggtctccggcggcagcgcggtcggacttggtctggggatccgcgagaggaggaagctcgggaacatgctgttcctcgccttgtgcggcgtgtgcttgctcctcggcgtcgtcaagatcttggcgggcggctggttcgccctccctggcaatgacaaagacgccgatttgaaggtaaataattaggatttttatgtgcaatggtagctgttattatttgatacgcctatgttgttcaccctcctgagtcatgatcaacagctcctggagagtcacctaaatgtcttatcccaacttgtcatgatgaataaacatgctctcagcctacttgttcagtt

SEQ ID NO: 40159 - protein, 227 aa, Zea mays subsp. mays
YAVFARSSSSVLTSPPSSINGASPNFAISAETTWGLGRKGYCHFRGRPGRLHRIHMGYQPMHGNGGTAGAGTSGSGGGGGGDHLRHHQQQRLHSPRMAGGGSMTRRASSFKRGGGGEIELQIGSPRSPRCDGLGSPPSDSVESSGSGLLLHQSQQNQHLRFRLFKPPVSGGSAVGLGLGIRERRKLGNMLFLALCGVCLLLGVVKILAGGWFALPGNDKDADLKVNN

SEQ ID NO: 40160 - protein, 172 aa, Zea mays subsp. mays
MGYQPMHGNGGTAGAGTSGSGGGGGGDHLRHHQQQRLHSPRMAGGGSMTRRASSFKRGGGGEIELQIGSPRSPRCDGLGSPPSDSVESSGSGLLLHQSQQNQHLRFRLFKPPVSGGSAVGLGLGIRERRKLGNMLFLALCGVCLLLGVVKILAGGWFALPGNDKDADLKVNN

SEQ ID NO: 40161 - protein, 167 aa, Zea mays subsp. mays
MHGNGGTAGAGTSGSGGGGGGDHLRHHQQQRLHSPRMAGGGSMTRRASSFKRGGGGEIELQIGSPRSPRCDGLGSPPSDSVESSGSGLLLHQSQQNQHLRFRLFKPPVSGGSAVGLGLGIRERRKLGNMLFLALCGVCLLLGVVKILAGGWFALPGNDKDADLKVNN

SEQ ID NO: 40162 - DNA, 618 bp, Zea mays subsp. mays
agagtatccaaaagggatttgcatatccacgcattttctcagatgctttagaaacgttagttgctgatggatgcactctggactatatataggtagacaagacaccagtgctctttgcttcctcctcgcacaacaaagcagctcacttgagttcaattcagccatgaggagccaggtcgcagcagtagccatgtttttgctcctcctggccttgggtgctgaggccgacctctgcgtcacgcgtagcaggaccttcaaagggtggtgccaccagagcgagaactgcatcaccgtctgcaagagcgagggcaataccggcgggttctgcaagctcggggcttgcatgtgcaccaaagagtgtgtccgaagtactgacgctgctggtgctaataaagccccacagcaccatttgagttgatgagtagtaatgaagaacgcttttgttatgccagcgcaagctctagaattcgaggccgagatgaccaaaaataaatgattttgttactctactatatgagcgaatatcggttgtggttgttctcaacctagtgacagtttttcagaaccgccaatgttaagtacaagtaatagaaatcaattttcactgacggtcgaggt

SEQ ID NO: 40163 - protein, 115 aa, Zea mays subsp. mays
MHSGLYIGRQDTSALCFLLAQQSSSLEFNSAMRSQVAAVAMFLLLLALGAEADLCVTRSRTFKGWCHQSENCITVCKSEGNTGGFCKLGACMCTKECVRSTDAAGANKAPQHHLS

SEQ ID NO: 40164 - protein, 84 aa, Zea mays subsp. mays
MRSQVAAVAMFLLLLALGAEADLCVTRSRTFKGWCHQSENCITVCKSEGNTGGFCKLGACMCTKECVRSTDAAGANKAPQHHLS

SEQ ID NO: 40165 - protein, 75 aa, Zea mays subsp. mays
MFLLLLALGAEADLCVTRSRTFKGWCHQSENCITVCKSEGNTGGFCKLGACMCTKECVRSTDAAGANKAPQHHLS

SEQ ID NO: 40166 - DNA, 1010 bp, Zea mays subsp. mays
aacttgctgataagtgctctaccagggtcagtggatgatgaagttaacttggaaggtttggggaataagattgttagaatggcagagacagaggaccagcagttagctttgttagctaatgcatctttactagctgaagagttgctaccgagagcagcgatgaagctgtactctatgaacccggtcagcaaagatagcttgcgtagaagaggtcctgaaaaccaaaatcgtgcggcagagcagcgggcatggaaaaggaagctgaaccgcatggtagagaaacttagagatagtttctgcagacagcatgctctagatcttatattcacagaagaaggtgacacccgtctgagcgcagagatgtacatcgatatggataatactgttgaagatcccgaatgggttccatctgcgattttccaggaattgtatgcgaaattgaataagatggcaagcgttgcggcagacatgtttgttggtagggaaaggtttgccacgctgcttatgatgagacttacggaggcagtcatgctttggctctcagacgaccagagcttttgggaagaggttgaagaaggaccaagggctctgggtccggttggacttcagcagttctacctcgatatgcaatttgtgatccttttcgggcaaggtcgtttcttatctcggcatgtgcatcaagtcatattggacatcattgatagagcgatgagagcgttttctgccacggggatggaccctgataggatccttccaagcgacgactggttcatcgacgttgcccaggagagtattagtaggatcggcggcgggagggcacgagtcgccaatggggacagggaggtgaacagccccacagcctccgtgtcagcgcagtccgtgtcgtcagttagatctctcggcagctcctagcgtgcacagtttctgtatcaatattactgtagggatttgtttggatgtgtttgtgctggtacatatgtgtgagtaattaattgtatgcctaggccaag

SEQ ID NO: 40167 - protein, 303 aa, Zea mays subsp. mays
NLLISALPGSVDDEVNLEGLGNKIVRMAETEDQQLALLANASLLAEELLPRAAMKLYSMNPVSKDSLRRRGPENQNRAAEQRAWKRKLNRMVEKLRDSFCRQHALDLIFTEEGDTRLSAEMYIDMDNTVEDPEWVPSAIFQELYAKLNKMASVAADMFVGRERFATLLMMRLTEAVMLWLSDDQSFWEEVEEGPRALGPVGLQQFYLDMQFVILFGQGRFLSRHVHQVILDIIDRAMRAFSATGMDPDRILPSDDWFIDVAQESISRIGGGRARVANGDREVNSPTASVSAQSVSSVRSLGSS

SEQ ID NO: 40168 - protein, 277 aa, Zea mays subsp. mays
MAETEDQQLALLANASLLAEELLPRAAMKLYSMNPVSKDSLRRRGPENQNRAAEQRAWKRKLNRMVEKLRDSFCRQHALDLIFTEEGDTRLSAEMYIDMDNTVEDPEWVPSAIFQELYAKLNKMASVAADMFVGRERFATLLMMRLTEAVMLWLSDDQSFWEEVEEGPRALGPVGLQQFYLDMQFVILFGQGRFLSRHVHQVILDIIDRAMRAFSATGMDPDRILPSDDWFIDVAQESISRIGGGRARVANGDREVNSPTASVSAQSVSSVRSLGSS

SEQ ID NO: 40169 - protein, 250 aa, Zea mays subsp. mays
MKLYSMNPVSKDSLRRRGPENQNRAAEQRAWKRKLNRMVEKLRDSFCRQHALDLIFTEEGDTRLSAEMYIDMDNTVEDPEWVPSAIFQELYAKLNKMASVAADMFVGRERFATLLMMRLTEAVMLWLSDDQSFWEEVEEGPRALGPVGLQQFYLDMQFVILFGQGRFLSRHVHQVILDIIDRAMRAFSATGMDPDRILPSDDWFIDVAQESISRIGGGRARVANGDREVNSPTASVSAQSVSSVRSLGSS

SEQ ID NO: 40170 - DNA, 789 bp, Zea mays subsp. mays
tcgaaaaactccaaccgccgagccagaggcacccggagcagcgcacagcaagtcagcaacagagcgcacaccgtcgccgcatccgcctccgcagcagcagcaatggcgcgcgccggcgctctctgcctggtgctgctctgcctcgtggccgcgcactcagccgcagcgcagaagtccacgacggccccggccgccgcgccggccgccgccaccaccccgccggcgaccccgaccaagaagacgcccgcgcccgccgccgcgccgcccaccaccccggccaccctggccccggccgccgccccgcccaccacgccggccacccccgcgcccgtcgctgcggcgcccactaccccggccaccctggcacccgccgcggcgccgtgatggcggtggcggctacggcggtggcggcggctacggtggcggcggcggctacggtggtggtggcggcggctacggcggtggcaaccgtggcggcggctacggcaactccgacgggaactggaggaactgagcggtggggcccgcgcggccaagttatcctgttcgctaccgtgatgtttaccctagtccagagggtttatcttcgttcgtgtcgtgtttgttgttgcccatctgtgtttttgattgcaaggtcgctctgtgtcagttgttagtgctgtgttcatcctcggtttcagcagacccatgcatcaaacagcatggactgcggatcgatggatgctgttacccccgtcaggctttattctaagttaatcttaaggaaaaaatggtgcttcttggtgctgc

SEQ ID NO: 40171 - protein, 217 aa, Zea mays subsp. mays
EKLQPPSQRHPEQRTASQQQSAHRRRIRLRSSSNGARRRSLPGAALPRGRALSRSAEVHDGPGRRAGRRHHPAGDPDQEDARARRRAAHHPGHPGPGRRPAHHAGHPRARRCGAHYPGHPGTRRGAVMAVAATAVAAATVAAAATVVVAAATAVATVAAATATPTGTGGTERWGPRGQVILFATVMFTLVQRVYLRSCRVCCCPSVFLIARSLCVSC

SEQ ID NO: 40172 - protein, 170 aa, Zea mays subsp. mays
RKTPTAEPEAPGAAHSKSATERTPSPHPPPQQQQWRAPALSAWCCSASWPRTQPQRRSPRRPRPPRRPPPPPRRRPRPRRRPRPPPRRPPPRPPWPRPPPRPPRRPPPRPSLRRPLPRPPWHPPRRRDGGGGYGGGGGYGGGGGYGGGGGGYGGGNRGGGYGNSDGNWRN

SEQ ID NO: 40173 - protein, 127 aa, Zea mays subsp. mays
SKNSNRRARGTRSSAQQVSNRAHTVAASASAAAAMARAGALCLVLLCLVAAHSAAAQKSTTAPAAAPAAATTPPATPTKKTPAPAAAPPTTPATLAPAAAPPTTPATPAPVAAAPTTPATLAPAAAP

SEQ ID NO: 40174 - DNA, 712 bp, Zea mays subsp. mays
aaaaaaacgcccattccccttcgccctcttcgaccctagcaagaagacgggcggcggagatggtgtactacgcgcttttggtgggcgcagagctggacggcctcaccaacctgcagcccagcggcggctgcgacgaccccagcttcccctactacctcaagctcaagtgcgagaactgcggggaggtcaccgccaagtccacctacgtcactctcagcgagcaagtcgacctgcccaagggacatggcaccgctcacctcgtccagaagtgcaagctttgtgggagagatggaacaattgtgatgattcctggtcaggggacgccacttactattgagcagagccagaaagaagagaagacttgtttgatggtgtttgactgcagaggctatgaacctgttgagttttcttttggagctggctggaaggctgagtctgtgcatgggactccttttgaaattgactgctctgaagatgaattttctgagtatgatgagaagggagaatgcccggttgagctaagcaagctgcagtcaacattcaaagtggtgaagaagcatgagaagggtggtaagacaagatttgtctagatccagtgacttggagtctgtcgggtattggaatcggaggtgtataaatggtacatttgggctaaaaggttgtgcgtaagacgtaccttctctgtctattgattttgtggatgccgtgaacc

SEQ ID NO: 40175 - protein, 195 aa, Zea mays subsp. mays
KNAHSPSPSSTLARRRAAEMVYYALLVGAELDGLTNLQPSGGCDDPSFPYYLKLKCENCGEVTAKSTYVTLSEQVDLPKGHGTAHLVQKCKLCGRDGTIVMIPGQGTPLTIEQSQKEEKTCLMVFDCRGYEPVEFSFGAGWKAESVHGTPFEIDCSEDEFSEYDEKGECPVELSKLQSTFKVVKKHEKGGKTRFV

SEQ ID NO: 40176 - protein, 176 aa, Zea mays subsp. mays
MVYYALLVGAELDGLTNLQPSGGCDDPSFPYYLKLKCENCGEVTAKSTYVTLSEQVDLPKGHGTAHLVQKCKLCGRDGTIVMIPGQGTPLTIEQSQKEEKTCLMVFDCRGYEPVEFSFGAGWKAESVHGTPFEIDCSEDEFSEYDEKGECPVELSKLQSTFKVVKKHEKGGKTRFV

SEQ ID NO: 40177 - protein, 111 aa, Zea mays subsp. mays
KKRPFPFALFDPSKKTGGGDGVLRAFGGRRAGRPHQPAAQRRLRRPQLPLLPQAQVRELRGGHRQVHLRHSQRASRPAQGTWHRSPRPEVQALWERWNNCDDSWSGDATYY

SEQ ID NO: 40178 - DNA, 947 bp, Zea mays subsp. mays
acttacctggacggggtcgacgggggatcaagaagcctcatggcctaggccagtggctcgcattgcacatggtgggtgcgctggcttaccatctccccaagtgggagagtggacgtcataagataggggagaagcagtgacaagcattgggaggaccattggaatcaggaatgaaaacataaagtcttccctgactccgcaagacaaagcaagcattatatcaactttgcaagcgaagggacacagagttgcaatggttggtgatggaataaacgatgccccgtctttagcagccgcagatgttggaatagccatgcgaactcattcaaaagagaacgctgcctctgatgcagcttcagttgttctactaggcaacagactttctcaggtggtagatgcgctatccctgtcgaaggcaacgatggcaaaagttcaccaaaatttggcctgggcagtggcatataacatagtagccattccaattgccgctggagtgctgctgccacaatatgatttcgccatgacaccatctctctcaggggggttgatggcccttagctcaatctttgttgtcagcaattctttgcttctgcagctgcatgggtcgtttcagaacacagaaaaacggcagggtgatctgagctcaagattaaactgaattgttgggtttagtttgacccagccgaaggacagtggtattgaattatagagggttctgatactggttttccagctccggctaattgaactgagtcagaactataagtagcaagctattcgtgtcagtagtagcatgttcctgtactgtttgtcaacccaactatagtagcaagtatgacccagaaggacaataatctaccacggccttcaaaaacattgtaaattagtaatggtactgctgtaagcctgtaaacaaagttaaggcgtatgactatcgttcatggtct

SEQ ID NO: 40179 - protein, 134 aa, Zea mays subsp. mays
MVGDGINDAPSLAAADVGIAMRTHSKENAASDAASVVLLGNRLSQVVDALSLSKATMAKVHQNLAWAVAYNIVAIPIAAGVLLPQYDFAMTPSLSGGLMALSSIFVVSNSLLLQLHGSFQNTEKRQGDLSSRLN

SEQ ID NO: 40180 - protein, 114 aa, Zea mays subsp. mays
MRTHSKENAASDAASVVLLGNRLSQVVDALSLSKATMAKVHQNLAWAVAYNIVAIPIAAGVLLPQYDFAMTPSLSGGLMALSSIFVVSNSLLLQLHGSFQNTEKRQGDLSSRLN

SEQ ID NO: 40181 - protein, 78 aa, Zea mays subsp. mays
MAKVHQNLAWAVAYNIVAIPIAAGVLLPQYDFAMTPSLSGGLMALSSIFVVSNSLLLQLHGSFQNTEKRQGDLSSRLN

SEQ ID NO: 40182 - DNA, 1161 bp, Zea mays subsp. mays
atctagaagataatcatattgattcatgggatgaaattgtgaaactttcttacttaagaagtttggaacaactccatttgaacaaaaacaggttaaagcatgtgaaatatccatctaatctttcaccagatggacctattgatgatgcagctgctgtgccatttgaaaatttgcaagttcttttgttaggatctaatgacatagatgacttttcttcagtggattcacttaacctgttcccaagtttaagggatgtcaggctttctgacaatcctgtagctgatcctgccaagggtggtgctcctcgttttgtgcttgttgctcgacttggaaaagttggaatactaaatggcagtgagataagtccacgtgaacggagggaatctgaaatacgatatgtccgccttgttatgggaaaaatagaatcaaatgaccaagaagagatcagacggcttcaccctagattcgctgaactgaagtcctttcatggtattgaagatgagaagccaacttcaagcatatcagggccacagaagatggcttctggccttataagtattacgttgaaatgtgtgggtccatcaatgggtgagaagcaaccactgacaaagaaactgcctgcgacaacaactgtcgggaagttaaaatctttgtgcgaaagcttcttcaaactgaaggacataaaagtgaaactgttcgtcgaagaagagggatgccctctaccacaaccagtggaggaggacacggcctctctgatggagcttggaattggctcgggcgcaaccattgttgtggacgaagagagctagccagtcgtctttagagaagggccaactgtatggcgcaaactgacgcttcagctgttattaagttttcgaagagaagatagctgatgacgctcttcgttgcccttatatacttctttctgtgggaatatgcacgtgatgaatattggtgcgggtttgggcttcaaaatggactagcatagtaaaaacattgtgaggacggttgtttggttgggagaagttttctttttttattttcgtcaacgcaacgaactacgtcaaatttttttttgattactgtggtgtgtcgctgacgttttccacaactgaaaccactctgtcattgtgccacagataatttttctttttatttagg

SEQ ID NO: 40183 - protein, 268 aa, Zea mays subsp. mays
LEDNHIDSWDEIVKLSYLRSLEQLHLNKNRLKHVKYPSNLSPDGPIDDAAAVPFENLQVLLLGSNDIDDFSSVDSLNLFPSLRDVRLSDNPVADPAKGGAPRFVLVARLGKVGILNGSEISPRERRESEIRYVRLVMGKIESNDQEEIRRLHPRFAELKSFHGIEDEKPTSSISGPQKMASGLISITLKCVGPSMGEKQPLTKKLPATTTVGKLKSLCESFFKLKDIKVKLFVEEEGCPLPQPVEEDTASLMELGIGSGATIVVDEES

SEQ ID NO: 40184 - DNA, 429 bp, Zea mays subsp. mays
cacacccacacagcaagccagcagagcagaaagcagccgcagccccagcccccacaagacgaggcaacaatggcgctagaagcagccaccgccccccgcgcactcctcgccgcgtgcctcgtcctgctggtcctcggcggcggcaccggcccgtcgtcggtgctgcgcggcgccggggcgcaggccggcgggcagtgcctgccgcagctgaaccgcctcctggcgtgccgcgcgtacctggtgcccggcgcgccggaccccagcgcggactgctgcagcgcgctgagcgccgtgtcgcacgagtgcgcggggggcggtggctgcttatatggctgtggctgccttgtgactcgtgtgggtctgtgggctgcggggtggttctaaagctctgcagccccgagtgtttatttattaattattgttgaggtt

SEQ ID NO: 40185 - protein, 140 aa, Zea mays subsp. mays
HPHSKPAEQKAAAAPAPTRRGNNGARSSHRPPRTPRRVPRPAGPRRRHRPVVGAARRRGAGRRAVPAAAEPPPGVPRVPGARRAGPQRGLLQRAERRVARVRGGRWLLIWLWLPCDSCGSVGCGVVLKLCSPECLFINYC

SEQ ID NO: 40186 - protein, 127 aa, Zea mays subsp. mays
HTHTASQQSRKQPQPQPPQDEATMALEAATAPRALLAACLVLLVLGGGTGPSSVLRGAGAQAGGQCLPQLNRLLACRAYLVPGAPDPSADCCSALSAVSHECAGGGGCLYGCGCLVTRVGLWAAGWF

SEQ ID NO: 40187 - protein, 104 aa, Zea mays subsp. mays
MALEAATAPRALLAACLVLLVLGGGTGPSSVLRGAGAQAGGQCLPQLNRLLACRAYLVPGAPDPSADCCSALSAVSHECAGGGGCLYGCGCLVTRVGLWAAGWF

SEQ ID NO: 40188 - DNA, 924 bp, Zea mays subsp. mays
cctcctcctcctctcggggtcggccccccggggggcgctatatacatgcgcacgcatcgcacatcctgcagcggcaccgacacgcgcgccgacgcaaagcaaagaaccagactacgtgcagcaaagaatccattcgccggccgaccgccatgtccgtcgcgggcgccgtgaccacagccgccgttccgtcccgagcgcccatgtcgtcgggtccgtcgacgaggcgcgctgcgggggcggggccactgcggcagcgggggcgggtggctcgccgttgccggccccacctcacgagtgcgcggtgtgcctgtccgagctgccggctggagccgaagcggcggtaccggtacggcgacggacgctgccggcgtgcggccacgcgttccacgcggactgcatcggaaggtggctgccgctgcgccccgagtgccctctctgccgccgccccgtgctgctcgccggtggcggcggacaacgggcggccgccggggcgccagctgcgtgggcgcggccggcggcgaccatagcgtgcggcttcggcgacgggagggtggtgtggtcgcgcagccccgtccctccgccagacagtgactgaaccgtttggttagaggccttttggattacttgctgtcggcagagtttgttcgtggtttgcacgttcgtctgtgtgttcagcgtctgcatgaacattacttagtctaattgcgtgccaaagacggaaacagaacgctggattagtgtgcgtacgtgttttgcagttttaccgcagcatggcagagcctgtctgtaaaaaaaactgcaaaagttatatatgcatgcacttgtaacgagtttccacctgtaaatttcttgtgcatatataaggaaaaacctccataaaatttccccatgcatgtcaaaagtgagcgatagatttttgctttc

SEQ ID NO: 40189 - protein, 197 aa, Zea mays subsp. mays
LLLLSGSAPRGALYTCARIAHPAAAPTRAPTQSKEPDYVQQRIHSPADRHVRRGRRDHSRRSVPSAHVVGSVDEARCGGGATAAAGAGGSPLPAPPHECAVCLSELPAGAEAAVPVRRRTLPACGHAFHADCIGRWLPLRPECPLCRRPVLLAGGGGQRAAAGAPAAWARPAATIACGFGDGRVVWSRSPVPPPDSD

SEQ ID NO: 40190 - protein, 174 aa, Zea mays subsp. mays
SSSSRGRPPGGRYIHAHASHILQRHRHARRRKAKNQTTCSKESIRRPTAMSVAGAVTTAAVPSRAPMSSGPSTRRAAGAGPLRQRGRVARRCRPHLTSARCACPSCRLEPKRRYRYGDGRCRRAATRSTRTASEGGCRCAPSALSAAAPCCSPVAADNGRPPGRQLRGRGRRRP

SEQ ID NO: 40191 - protein, 125 aa, Zea mays subsp. mays
MSVAGAVTTAAVPSRAPMSSGPSTRRAAGAGPLRQRGRVARRCRPHLTSARCACPSCRLEPKRRYRYGDGRCRRAATRSTRTASEGGCRCAPSALSAAAPCCSPVAADNGRPPGRQLRGRGRRRP

SEQ ID NO: 40192 - DNA, 1108 bp, Zea mays subsp. mays
gattagccgagtcctttattgcaaaaacacgcatcacctccgtggttccgtcgccatctcgttcccgtgacccacccaccccgtcgcgtctcgacctggcttcctcctcctcgaggaccgccgtgcaggagcggagctccccgccgcttctctctccgccttccgagaggcccgacccctgataccacgctgagggcggtggtattaggagattagcgatggcgaggtggcggccggcggcgctgctggtagtggctctggcggcggttctatcggcggcgtggcgggcggatgcgctatcggttacggtgaccgacaccgagtgcatccacgagttcgtgccctatgagggcgacaccgtgtccgggaacttcgtcgtcgtcgaccacgacatcttctggagctccgaccacccaggaatcgacctcacggtaacgtcaccaggtggcaacactgtgtacacattgaagggaaaatctggtgagaaatttgagtttaaagctccaagaggtggcatgtataagttctgcttccataacccatatggagcacctgaaactgtttctttctacatccatgttgggcacatacccaatgagcacaatctgccgaaagatgagcacttggaccctatcaatgttaaaatcgcggagctgaaggaagcattagaatccgtcaccgccgagcagaagtacctaaaagcacgcgaagctcgtcaccgacacactaatgagagcaccagaaagcgtgtcatgttctatacgatggcggagtacctggctttcatggctgctagcgcgttgcaggtcctctacatccgccgcttgttcagtaaaaatgtgggatacaacagagtgtaggatagaaatctacttcaaaggcgacagtggaagcaccgcatatgatggtcggagcgggaaacattctctgccagtttgacaaattgtagttctgcaccctcctttttttgttagtttataagaaacactttaatttatcatcatgtacttttagcaacacttgtgatatgttaagtgcatttggtgctgaacattgttccataactaatcttcagaggtttgttatgaaagttagtatcgctctgccg

SEQ ID NO: 40193 - protein, 213 aa, Zea mays subsp. mays
MARWRPAALLVVALAAVLSAAWRADALSVTVTDTECIHEFVPYEGDTVSGNFVVVDHDIFWSSDHPGIDLTVTSPGGNTVYTLKGKSGEKFEFKAPRGGMYKFCFHNPYGAPETVSFYIHVGHIPNEHNLPKDEHLDPINVKIAELKEALESVTAEQKYLKAREARHRHTNESTRKRVMFYTMAEYLAFMAASALQVLYIRRLFSKNVGYNRV

SEQ ID NO: 40194 - protein, 114 aa, Zea mays subsp. mays
MYKFCFHNPYGAPETVSFYIHVGHIPNEHNLPKDEHLDPINVKIAELKEALESVTAEQKYLKAREARHRHTNESTRKRVMFYTMAEYLAFMAASALQVLYIRRLFSKNVGYNRV

SEQ ID NO: 40195 - DNA, 878 bp, Zea mays subsp. mays
aaattaaaccgccggcgcctccacttcgcgttctcgcctcatctcctcccgctcaggatccgccggcgaaggtaaggcaagatgtacaccgcgaggaagaagatccagaaggataagggccttgagccctctgagttcgaggactctgtcgcccaggctttcttcgacctggagaacggtaaccaggagctcaagagcgacctcaaggacctttacatcaacggtgctatccagctggatgttgccgggagcaggaaggctgttgtgatccacgtcccataccgcttgcgcaaggccttcaggaagatccatgtcaggatcgtcagggagctggagaagaaattcagcggcaaggatgtggtaattgttgccacaaggaggatcgtgcggccgcccaagaagggttcagctgttcagcgccctcgctccaggactctgactgctgtccacgatggcatcttggaggatgttgtcttcccagctgagattgtggggaagcgagtcaggtaccgtctggatggtgccaagatcatcaaggtaacctacatgtcttattgaggaactgaaagatgccacatgatcttcttggacccaaaggagaggaacaacaccgaatacaagctggacacctacactacggtctaccgcaggctgtgtgggaaagatgtggtctttgagtaccctatgaccgaaaatgcataaatatgacgccccggatatccccatttcatttcgttgaatctgggtgtttctttggggtctcaactagactgctccgtatgtacttcaaaaaccatagttttgatgccaaagttgcctaggaatttggtactcgggaattggcagcggacgtgaacaatgttaagttttgagcattt

SEQ ID NO: 40196 - protein, 158 aa, Zea mays subsp. mays
MYTARKKIQKDKGLEPSEFEDSVAQAFFDLENGNQELKSDLKDLYINGAIQLDVAGSRKAVVIHVPYRLRKAFRKIHVRIVRELEKKFSGKDVVIVATRRIVRPPKKGSAVQRPRSRTLTAVHDGILEDVVFPAEIVGKRVRYRLDGAKIIKVTYMSY

SEQ ID NO: 40197 - DNA, 1085 bp, Zea mays subsp. mays
aaacaggcgacccgcgtgtcagagatgcagcatagcatggacgcgggcgaggtgcggcactggaacgcggacgtgaacggcgtctccatccacgtcgccgagcggggccccgaggatgggccggcggtgctcctcctccacggcttcccggagctctggctctcgtggcgccaccagatggccgcgctcgccgcccgcgggttccgtgcgctagcccccgacctccgcggctacggcgactcctccgcgccgtccgaccccgccgcctactccatcttccacatcgtcggcgacgtcgtcgcgctcctcgaccacctccaactcacaaaggtgttcgtggcggggcacgactggggcgcgcatgcggcgtggctcctctgcctgttccggccggaccgggtgcgcgccgccgtcgttctgggggtaccgtactccgctcgacacgcacacgctcgccccatcacggaggccttcgcggcgtttggcgagggcttttacataaatcagttgcaggaggctggaagagctgagagcgcattcgcccgttacgatgtcgcaactgtcctaaaaaagttctactccatcgaaatagatgatgtcaccgctcctcctggggtggagatcatagacttcctggaggcgtctccctcgccacttccttggatcagcgaggaagaactgggccagtatgctgagaagtttcacaagtccgggttcactggacccctcaactactaccgcatgtcggagacgaactcgagactccttgcaccctggaacggagcgaagattacagtgcctgtgaagttcatagctggcgataaggacatcggtgcccagtcctttggaactggggagtacatcaagagcgcggagttcgagtccaccgttccagatcttgaagtcaccgtcatcgagggccaccattttctccagcaggaacaggccgagagggtgaactcggagatggtttcctacctcgtcaggtttactagctagccagtaaagaaatctttctgaactgaagtcttgaagagctgaataaagtgtgagctaggcatttgctcttgcttctttctcacctc

SEQ ID NO: 40198 - protein, 332 aa, Zea mays subsp. mays
KQATRVSEMQHSMDAGEVRHWNADVNGVSIHVAERGPEDGPAVLLLHGFPELWLSWRHQMAALAARGFRALAPDLRGYGDSSAPSDPAAYSIFHIVGDVVALLDHLQLTKVFVAGHDWGAHAAWLLCLFRPDRVRAAVVLGVPYSARHAHARPITEAFAAFGEGFYINQLQEAGRAESAFARYDVATVLKKFYSIEIDDVTAPPGVEIIDFLEASPSPLPWISEEELGQYAEKFHKSGFTGPLNYYRMSETNSRLLAPWNGAKITVPVKFIAGDKDIGAQSFGTGEYIKSAEFESTVPDLEVTVIEGHHFLQQEQAERVNSEMVSYLVRFTS

SEQ ID NO: 40199 - protein, 324 aa, Zea mays subsp. mays
MQHSMDAGEVRHWNADVNGVSIHVAERGPEDGPAVLLLHGFPELWLSWRHQMAALAARGFRALAPDLRGYGDSSAPSDPAAYSIFHIVGDVVALLDHLQLTKVFVAGHDWGAHAAWLLCLFRPDRVRAAVVLGVPYSARHAHARPITEAFAAFGEGFYINQLQEAGRAESAFARYDVATVLKKFYSIEIDDVTAPPGVEIIDFLEASPSPLPWISEEELGQYAEKFHKSGFTGPLNYYRMSETNSRLLAPWNGAKITVPVKFIAGDKDIGAQSFGTGEYIKSAEFESTVPDLEVTVIEGHHFLQQEQAERVNSEMVSYLVRFTS

SEQ ID NO: 40200 - protein, 320 aa, Zea mays subsp. mays
MDAGEVRHWNADVNGVSIHVAERGPEDGPAVLLLHGFPELWLSWRHQMAALAARGFRALAPDLRGYGDSSAPSDPAAYSIFHIVGDVVALLDHLQLTKVFVAGHDWGAHAAWLLCLFRPDRVRAAVVLGVPYSARHAHARPITEAFAAFGEGFYINQLQEAGRAESAFARYDVATVLKKFYSIEIDDVTAPPGVEIIDFLEASPSPLPWISEEELGQYAEKFHKSGFTGPLNYYRMSETNSRLLAPWNGAKITVPVKFIAGDKDIGAQSFGTGEYIKSAEFESTVPDLEVTVIEGHHFLQQEQAERVNSEMVSYLVRFTS

SEQ ID NO: 40201 - DNA, 696 bp, Zea mays subsp. mays
tctccacctccatcacccgcctccactcccccctcccaggtgctgcccaggtaagtcggcggcggcgatgacaacgcgcttcaagaagaaccgcaagaagcgcggccacgtgtccgccgggcacggccgcatcggcaagcacaggaagcacccgggaggtcgcggtaacgccggtggcatgcaccaccaccgtatcctcttcgacaagtaccatccgggctacttcggcaaggttggcatgcgttacttccataagctccgcaacaagttctactgccccgcggtcaacatcgagcgcctctggtcgatggtgcccaccgacaaggcggcggaggccggcggcgacaaggccccgcagatcgacgtcacgcagttcggctacttcaaggtgctcgggaagggggtgctgccgccaaagcccattgtcgtcaaggccaagctcatctccaaggtcgccgagaagaagatcaaggcagcaggcggcgccgtcgtgctcaccgcctaggtttcagtccttgttcgcctcctggttttgaaatctatatctgaactgatagtgctttcctgtctcggcaatttgtgttaagaaaacctgtagttttaaaatatgtggttcctgcctgtttggcagtgcttatgcggtttttgatgccagttcatatcaaatatttcacatcaattaaatctatcctcgct

SEQ ID NO: 40202 - protein, 167 aa, Zea mays subsp. mays
LHLHHPPPLPPPRCCPGKSAAAMTTRFKKNRKKRGHVSAGHGRIGKHRKHPGGRGNAGGMHHHRILFDKYHPGYFGKVGMRYFHKLRNKFYCPAVNIERLWSMVPTDKAAEAGGDKAPQIDVTQFGYFKVLGKGVLPPKPIVVKAKLISKVAEKKIKAAGGAVVLTA

SEQ ID NO: 40203 - protein, 145 aa, Zea mays subsp. mays
MTTRFKKNRKKRGHVSAGHGRIGKHRKHPGGRGNAGGMHHHRILFDKYHPGYFGKVGMRYFHKLRNKFYCPAVNIERLWSMVPTDKAAEAGGDKAPQIDVTQFGYFKVLGKGVLPPKPIVVKAKLISKVAEKKIKAAGGAVVLTA

SEQ ID NO: 40204 - protein, 108 aa, Zea mays subsp. mays
MHHHRILFDKYHPGYFGKVGMRYFHKLRNKFYCPAVNIERLWSMVPTDKAAEAGGDKAPQIDVTQFGYFKVLGKGVLPPKPIVVKAKLISKVAEKKIKAAGGAVVLTA

SEQ ID NO: 40205 - DNA, 1061 bp, Zea mays subsp. mays
aggaaaaccaaccaccactcccaccaccctccgcctccgcctgcgccacagctgccgattcgaaagccctcgtcctgacccctcgcaaaaccctagctccaaccaccatgaagggcaaggccaacgcctccaagaaggatgaggccaggctccgggccggcggcggtggcccgatgggcggaatgctgcctcaacaaggcatgatgaggcctcctaacattcttggtggtgctggtgccggcttccccagcacggcccagatgggcggcggacctatgggcatgccggttggccacccgcacatgggtattatgcagcagggcggcggtggcggtggtggtggcatgccgggcctggggttccacccgggattgggcggcggcggaatgcattctggggcggatatgcttcaggccgccgcggcatccgggaaccccgtggcgcagcagcagtacatggccttgatgcagcagcagcagcagcagatgatgatgatgcagcagcagcaacagcagcacgggaacggcggtttaggatacccggcggcaatgggctacggctatggccggccaccgatgcattacccaatgggctacccagtgctgcccccgcactcgcatgctgagccttacaacatcttcagcgacgagaacgccaacagctgctcactgatgtgatcagcaattccgcatggaatggccctgttccaagtaaaccatctcaaggagctcaatgtcaccgctgatcaccgacagacatcgccatggttgaagcgccgtgaatcaatcaacaatcagtatgcttggggatgagtcctagctagaaccctgtccctttcctgctccttccccccctttctctagcttattttcgccttgctttaaaaaaaaaggaacttccttgaatgcgaagttaggtatagtaattatgaggtttccataagggaggggaggagagaggagacgatagggacttcgtacggggtcgttcgcttgtgggttcttccctcctggcttcattaaggtggactaatggtagaacaatgttgtcaatctcagtcg

SEQ ID NO: 40206 - protein, 224 aa, Zea mays subsp. mays
ENQPPLPPPSASACATAADSKALVLTPRKTLAPTTMKGKANASKKDEARLRAGGGGPMGGMLPQQGMMRPPNILGGAGAGFPSTAQMGGGPMGMPVGHPHMGIMQQGGGGGGGGMPGLGFHPGLGGGGMHSGADMLQAAAASGNPVAQQQYMALMQQQQQQMMMMQQQQQQHGNGGLGYPAAMGYGYGRPPMHYPMGYPVLPPHSHAEPYNIFSDENANSCSLM

SEQ ID NO: 40207 - protein, 189 aa, Zea mays subsp. mays
MKGKANASKKDEARLRAGGGGPMGGMLPQQGMMRPPNILGGAGAGFPSTAQMGGGPMGMPVGHPHMGIMQQGGGGGGGGMPGLGFHPGLGGGGMHSGADMLQAAAASGNPVAQQQYMALMQQQQQQMMMMQQQQQQHGNGGLGYPAAMGYGYGRPPMHYPMGYPVLPPHSHAEPYNIFSDENANSCSLM

SEQ ID NO: 40208 - protein, 167 aa, Zea mays subsp. mays
MGGMLPQQGMMRPPNILGGAGAGFPSTAQMGGGPMGMPVGHPHMGIMQQGGGGGGGGMPGLGFHPGLGGGGMHSGADMLQAAAASGNPVAQQQYMALMQQQQQQMMMMQQQQQQHGNGGLGYPAAMGYGYGRPPMHYPMGYPVLPPHSHAEPYNIFSDENANSCSLM

SEQ ID NO: 40209 - DNA, 713 bp, Zea mays subsp. mays
aaaatggattgaggtaaaagctctcgccacaataacttcctcaataatccaaaagttttacatgcaaaatatcatctgccgctttagagtcccaaagtctctaactattgaaaatggtgcccaattcgactccaaagcattcatgatgttttgtaatcaggttggtaccaacacacactttgctttagttaggcatccgaaatccaatggattggtcgaaagggcaaatggtaaaattcttctgggaatcacgaagtttctattcggactaccaaagggaaaatggcttgaggagttaatcaaagttgtggaataataatactttggtatcaaggtctataggatttacgccattcaaactcctcttaagagacgaagcaatgactccagaagaagcaaagctagggccaactagagccatggcatcaatttgcaacgataaggaagactcaatagaacacataaggaatcaaaagacgtaatagaggaatcaagactcgaagccattgaatagataaggaagtaccaagctgaaacaacaaagttggcaaaatataaaggtaaagttgaagaatatagcactgcactagggcacttagtgcttcaaagggttgccaagccagacatagctggcaagcttcagacaaagtgggaaagtccctgcttggtttcagcctcaaataggccagggtcatttagactaagggatatgc

SEQ ID NO: 40210 - protein, 104 aa, Zea mays subsp. mays
KWIEVKALATITSSIIQKFYMQNIICRFRVPKSLTIENGAQFDSKAFMMFCNQVGTNTHFALVRHPKSNGLVERANGKILLGITKFLFGLPKGKWLEELIKVVE

SEQ ID NO: 40211 - protein, 84 aa, Zea mays subsp. mays
MQNIICRFRVPKSLTIENGAQFDSKAFMMFCNQVGTNTHFALVRHPKSNGLVERANGKILLGITKFLFGLPKGKWLEELIKVVE

SEQ ID NO: 40212 - protein, 57 aa, Zea mays subsp. mays
MMFCNQVGTNTHFALVRHPKSNGLVERANGKILLGITKFLFGLPKGKWLEELIKVVE

SEQ ID NO: 40213 - DNA, 935 bp, Zea mays subsp. mays
gctagtttcgttcttatctccgtttctctggattgtcccccgctcccctcttccggtcttccccatgtcggatgcgtataggaaagccaagcccggccgcctcgtcttcaagggcggcgaagccgcctccatccacaagccaaagaagcacaagaagaataagaagcccgcgtcggcgagggcgtcctccccgggcgaggggctgaccctgttctacaacccggcggcgagcaagatggccccgaacgacgtgttcggcgtggcgttcaacggcggcttcaaccagcccatcatgtgcggcggcgagccgaggcagatgacgctgcaggtccgcgggaaagccgacccgcccatctacaccatcaggatacgcgtgccgcagcacgccacaagcttgatcttctccttcaccaacggggccgagtgggacgggccgtacaccctcaagttcagggtcccgaagccatggcagaagaagccgctgagcttcttcaacgagggcctggcggacgagctcaacagggagggcgcgtgcgacctggccatctacccggacgagaacatcgccatcaccagttgcgccatggacggctacctcgacgaggggggggatcggtgcaagctggatatcgtgagcgggtgcacggaccccagctccgacatgttcgacccgctggccaccgtcgacgacggctcctgccccctcgagtctgattccgaggaatgaagcttcagttcgatcctaaaaagttaggacccttaaataattttagtttaaaaatgaataggaataggatccgatcctaatccgattagatccttaaagtttgtagcgtaaaattgaaagctcattaccacccctatgtccatacatcttatcagtgcaagtttgtgatcatgtgatacattaagcatatacgtgtatgtatttcacc

SEQ ID NO: 40214 - protein, 241 aa, Zea mays subsp. mays
LVSFLSPFLWIVPRSPLPVFPMSDAYRKAKPGRLVFKGGEAASIHKPKKHKKNKKPASARASSPGEGLTLFYNPAASKMAPNDVFGVAFNGGFNQPIMCGGEPRQMTLQVRGKADPPIYTIRIRVPQHATSLIFSFTNGAEWDGPYTLKFRVPKPWQKKPLSFFNEGLADELNREGACDLAIYPDENIAITSCAMDGYLDEGGDRCKLDIVSGCTDPSSDMFDPLATVDDGSCPLESDSEE

SEQ ID NO: 40215 - protein, 220 aa, Zea mays subsp. mays
MSDAYRKAKPGRLVFKGGEAASIHKPKKHKKNKKPASARASSPGEGLTLFYNPAASKMAPNDVFGVAFNGGFNQPIMCGGEPRQMTLQVRGKADPPIYTIRIRVPQHATSLIFSFTNGAEWDGPYTLKFRVPKPWQKKPLSFFNEGLADELNREGACDLAIYPDENIAITSCAMDGYLDEGGDRCKLDIVSGCTDPSSDMFDPLATVDDGSCPLESDSEE

SEQ ID NO: 40216 - protein, 163 aa, Zea mays subsp. mays
MAPNDVFGVAFNGGFNQPIMCGGEPRQMTLQVRGKADPPIYTIRIRVPQHATSLIFSFTNGAEWDGPYTLKFRVPKPWQKKPLSFFNEGLADELNREGACDLAIYPDENIAITSCAMDGYLDEGGDRCKLDIVSGCTDPSSDMFDPLATVDDGSCPLESDSEE

SEQ ID NO: 40217 - DNA, 1534 bp, Zea mays subsp. mays
gacaaagaagagtcgtgttggtgagctaactacccaacctgtgaagctacccccattctctctcaacgttttcgttttgaaatggcgaggaagaagatcagagagtatgactcaaagaggttggtgaaggaacatttcaaaaggctttctggcaaagagcttcctatcagatccgttcagattaatgaaacaactgatctaaatgagctagttgaaaaggaaccttggctctcgtctgagaagctggtggtgaaacctgacatgttgtttggaaagcgtggcaagagtggtttggttgccttgaaattagattttgctgatgttgccacttttgttaaagaacgtttgggaaaagaggtagagatgagtggatgcaaaggacccataacaacattcatagttgaaccatttgttccacacaatgaggagtattatctcaatgttgtctcggatcggcttggttgcagcataagcttttctgagtgtggaggaattgagatcgaggagaactgggacaaggtcaagacaatatttttaccaacaggtgcttccctgacacctgaaatatgtgcacctcttgtcgcaactcttcccttagagatcaaagctgaaattgaagaatttatcaaagtcattttcaccctattccaagatcttgatttcactttcttggagatgaatcctttcactctagtagatggaagtccttatcctctggatatgaggggtgagcttgatgatactgctgccttcaaaaactttaaaaaatggggcgacattgaatttcctctgccatttggaagagtaatgagtcctacagaaagctttatccacggactggatgagaagacaagtgcgtctttgaagtttaccgttctgaaccccaagggacggatttggacaatggtagctggtggaggagcaagtgtcatctatgcggatacggttggagatctcgggtatgcatctgaacttggcaactatgctgaatacagtggagcacccaaagaagatgaggttttgcagtacgccagagtcgttattgattgtgctacagcaaacccggatggaaaaagcagagcccttgtcatcggaggcggaattgccaacttcactgacgttgctgctactttcaatggcataatccgcgctcttaaagaaaaggaagcaaagctgaaagcagcaaggatgcatatatttgtgaggagaggaggaccaaactaccaaaagggacttgctaaaatgcgagcccttggagatgatatcggtgtccccatcgaggtctatggcccagaagcaaccatgacaggtatctgcaaggaggcaatccagtacatcacagcagcagcataagcttctctcagtaccttctatgaccaaaactttgtctgtgttttagagcctttatttactgtggttaagattactcaagctataagatacttgcaatttcttgaaaacttctgttgttcgattctctttcccctaacgttttcttcagattcaataaataatcgttacttaaaaaaaaaag

SEQ ID NO: 40218 - protein, 423 aa, Zea mays subsp. mays; identical to SEQ ID NO: 9390

SEQ ID NO: 40219 - protein, 363 aa, Zea mays subsp. mays; identical to SEQ ID NO: 9391

SEQ ID NO: 40220 - protein, 329 aa, Zea mays subsp. mays; identical to SEQ ID NO: 9392

SEQ ID NO: 40221 - DNA, 2413 bp, Zea mays subsp. mays
attactgtatgactcaggttgttcagtcccaagccttagaaccgccgcctccattgttctgttcagtggtcaattatcaggaggttgaaaacctgcaggagactgaaaatactctttggaatgaaaaccaaggaagtcccggtaaagaacttgatagtgacaaacaagctcacatgatacagaatccagtactctctgctactgaaaatgaaatgatcgtagatgatgcggaacctcagtatgaaactgtatatagtcactgtgcggatgctgtggagaacagagagctggaaaagagttgtgaggttgatgagcagaaggagcagatgcaagccaccaattctatctcagtatctgagaacttttcacgtgaaaaattgaattcatctcctgcaaggggtactccaaattgcaactcagtatgccgaatttctaccgcagaaagtgaaaatgctatgcagaacaacagttattacagcaccaatgttcagtatggtgagaacaaatcattaaatgttgacactgtcaaagaagaaagcaaagttgaaacaggcacaactcaggtgaagaaagttgttagttctgatgtgcaatgcactgttgagtcttttgagactgcacttgactcattggtgaggacaaaggagaccattggccgagcaactcgcttggctatggacttggcgaaatttggcgtttcggcaaaggcgatggaaattctggcccacactttggaaagtgagtcaaatttacaaaggagggtggatttatttttccttgtggattctattgctcagtgctccaaaggtttgaatggtgatgctggtggtgtttatctttcatccattcaggctatgctacctcgcctattaactgctgctgtcccagctggagctaccacacaagaaaaccgaaaacagtgcttgaaggttttgaggctttggcttgaaagacggatccttcctgaatctatagttcgtcaccatataagagaacttgattcgcttagtaatgttcctgcttgcctctattctcggcgatccgctcgaacagaaagggcgctggatgaccctgttagagatatggagggtatactggtggatgaatatggaagtaattcaactctccagcttcatggattctgcatacctccaatacttagggatgaagacgaaggaagtgactcggatgggggtgattttgagtctgtcacccctgaacacgagtcaagaagccttgaagaacatgtcacaccgtccattaccgaaaggcatacccgtatactggaagatgttgatggtgagcttgaaatggaagacgtggctccaccttgggaaggtggaagcagtgctagtgcgatcacagatcaagctgataatagagagtctgcaaattgtctgcttgtccctggaacttcacatcagaatgttacctcgtcatctccaccagctcgcccttcgcagaatgctcagttggcaatgtctaattcctactcaaatggctttgactaccgcagaaatcccagcatgcagggcgactatcatgccggtcctccaaggatgaatcccccaatgcattacggaagtcctgaaccatcttatagttcccgagtatctttgtcaaaaagcatgccacgtggggagggttctaacttccagcataggccatatccatcttctcatcccccacctcctccgccatcacatcattattcatatatggagccggaccaccatataaagtcgcggagagaaggtctatcataccctcacagatctcattacacactggaatttgacgaaaggaattatcaagacagctatgagagaatgaggcctgaaccatgcgagaatcgagacaattggagatatcatccgccctcttctcatggtccacgatatcatgacagacacaaaggacctcatcaatcgagctcatacagtgggcatcaccgtgactcaggaaggttgcagaacaataggtggagtgattctccgcgtgcatataacaatagacactcttatcactataagcagcattcggaaggtcctgttccagtaggaatgagagatccagggacgtggcatcaaaggtgagtgggagacaagagatgaagaagggcaaaggtgcagtctgctctaaatgaaagacatttgggctatagtcatggaaaaaagaaatagggagaaacaagtgtaggttggaaagacctgggccacttgagagagatgttaatatacaaaagaaaaaaggcacagttggtgtgtgtacatatgaccaaaaacgtcgtggagaaggctaaagaaacagtcgtgaaaagccatttgttgtagtagagagagagagatttgagttaggcaatactgtcactgatttaggcatttgatattttgtaaacaaaattttttggttt

SEQ ID NO: 40222 - protein, 697 aa, Zea mays subsp. mays
YCMTQVVQSQALEPPPPLFCSVVNYQEVENLQETENTLWNENQGSPGKELDSDKQAHMIQNPVLSATENEMIVDDAEPQYETVYSHCADAVENRELEKSCEVDEQKEQMQATNSISVSENFSREKLNSSPARGTPNCNSVCRISTAESENAMQNNSYYSTNVQYGENKSLNVDTVKEESKVETGTTQVKKVVSSDVQCTVESFETALDSLVRTKETIGRATRLAMDLAKFGVSAKAMEILAHTLESESNLQRRVDLFFLVDSIAQCSKGLNGDAGGVYLSSIQAMLPRLLTAAVPAGATTQENRKQCLKVLRLWLERRILPESIVRHHIRELDSLSNVPACLYSRRSARTERALDDPVRDMEGILVDEYGSNSTLQLHGFCIPPILRDEDEGSDSDGGDFESVTPEHESRSLEEHVTPSITERHTRILEDVDGELEMEDVAPPWEGGSSASAITDQADNRESANCLLVPGTSHQNVTSSSPPARPSQNAQLAMSNSYSNGFDYRRNPSMQGDYHAGPPRMNPPMHYGSPEPSYSSRVSLSKSMPRGEGSNFQHRPYPSSHPPPPPPSHHYSYMEPDHHIKSRREGLSYPHRSHYTLEFDERNYQDSYERMRPEPCENRDNWRYHPPSSHGPRYHDRHKGPHQSSSYSGHHRDSGRLQNNRWSDSPRAYNNRHSYHYKQHSEGPVPVGMRDPGTWHQR

SEQ ID NO: 40223 - protein, 695 aa, Zea mays subsp. mays
MTQVVQSQALEPPPPLFCSVVNYQEVENLQETENTLWNENQGSPGKELDSDKQAHMIQNPVLSATENEMIVDDAEPQYETVYSHCADAVENRELEKSCEVDEQKEQMQATNSISVSENFSREKLNSSPARGTPNCNSVCRISTAESENAMQNNSYYSTNVQYGENKSLNVDTVKEESKVETGTTQVKKVVSSDVQCTVESFETALDSLVRTKETIGRATRLAMDLAKFGVSAKAMEILAHTLESESNLQRRVDLFFLVDSIAQCSKGLNGDAGGVYLSSIQAMLPRLLTAAVPAGATTQENRKQCLKVLRLWLERRILPESIVRHHIRELDSLSNVPACLYSRRSARTERALDDPVRDMEGILVDEYGSNSTLQLHGFCIPPILRDEDEGSDSDGGDFESVTPEHESRSLEEHVTPSITERHTRILEDVDGELEMEDVAPPWEGGSSASAITDQADNRESANCLLVPGTSHQNVTSSSPPARPSQNAQLAMSNSYSNGFDYRRNPSMQGDYHAGPPRMNPPMHYGSPEPSYSSRVSLSKSMPRGEGSNFQHRPYPSSHPPPPPPSHHYSYMEPDHHIKSRREGLSYPHRSHYTLEFDERNYQDSYERMRPEPCENRDNWRYHPPSSHGPRYHDRHKGPHQSSSYSGHHRDSGRLQNNRWSDSPRAYNNRHSYHYKQHSEGPVPVGMRDPGTWHQR

SEQ ID NO: 40224 - protein, 640 aa, Zea mays subsp. mays
MIQNPVLSATENEMIVDDAEPQYETVYSHCADAVENRELEKSCEVDEQKEQMQATNSISVSENFSREKLNSSPARGTPNCNSVCRISTAESENAMQNNSYYSTNVQYGENKSLNVDTVKEESKVETGTTQVKKVVSSDVQCTVESFETALDSLVRTKETIGRATRLAMDLAKFGVSAKAMEILAHTLESESNLQRRVDLFFLVDSIAQCSKGLNGDAGGVYLSSIQAMLPRLLTAAVPAGATTQENRKQCLKVLRLWLERRILPESIVRHHIRELDSLSNVPACLYSRRSARTERALDDPVRDMEGILVDEYGSNSTLQLHGFCIPPILRDEDEGSDSDGGDFESVTPEHESRSLEEHVTPSITERHTRILEDVDGELEMEDVAPPWEGGSSASAITDQADNRESANCLLVPGTSHQNVTSSSPPARPSQNAQLAMSNSYSNGFDYRRNPSMQGDYHAGPPRMNPPMHYGSPEPSYSSRVSLSKSMPRGEGSNFQHRPYPSSHPPPPPPSHHYSYMEPDHHIKSRREGLSYPHRSHYTLEFDERNYQDSYERMRPEPCENRDNWRYHPPSSHGPRYHDRHKGPHQSSSYSGHHRDSGRLQNNRWSDSPRAYNNRHSYHYKQHSEGPVPVGMRDPGTWHQR

SEQ ID NO: 40225 - DNA, 2798 bp, Zea mays subsp. mays
ttttaatccgcttaactatttcacaagaacgtcgtgtcagcaaagcagctgcacgtgctttggcaatcctaggggagaatgagaacttgcgtcgagcaattagaggaaggccagttgcaaagaagggtctacgcattctatcaatggatggtggtggcatgaagggccttgcaactgttcaaatgcttaaacagatagagcaaggaactgggaaacgcatacatgaaatgtttgatctcatatgtggtacgtccactggtggcatgcttgcaatggctcttgggatcaagcagatgactttggatcagtgtgaagaaatatacacaaaacttggaaaacttgtatttgctgaacctatcccaaaggatgaagctgctacgtggaaggagaagcttgatcaacttttcaaaagttcgtcacaaagttttagagtggttgtacatgggtccaagcacagcgcagatcaattcgagaggttactaaaggaaatgtgtgccgatgaagatggtgaccttctaattgaatctgctgtaaaaggcattccaaaggtttttgctgtatccactttagtcagtgtcatgcctgctcaaccgtatatattccgaaactatcagtatcctcctggcactctggaggtatcaccaggaatggcagaaagtccatcaattagtgcaattggtactgctgtttctggtgcgccagttggtattaaacgtggtgccttcatggggagctgcaagcatcgcgtgtgggaagcgataagagcatcatctgcagcaccatattatttggatgatttctctgttgatgccaatcgttggcaagatggagctattgtagccaacaatcctacgatctttgccattagagaagcacaacttttgtggccagatacacgaatagattgtctagtttcgataggatgtggctcagttccaactaagagtcgtagaggtggatggcgctacttggacacagggcaagtgttaatagaaagtgcatgctcagtggagagagttgaagaaactttggatacactgataccaatgcttcctgaaatgcaatatttccgctttaatccagtggatgaacgatgtggtatggaattagatgaaactgatcctgctatctggcttaagttggaagctgcagctgatgagtacattcagaagaattttctggctttcaagaatctttgtgagcttctggtcccaaggtaccaagaggaagaaaagtcatctgatatttacaaatccctttcattttcaaggctgacatcattaaatcaaggtttcagcgaaagtaatcctaccttaggatggaggcgtgtggttttacttgtcgaggcttcctttagtcctgattttgggaagaaaataaatcatgcacgctcccttgaatctttctgctcccagaatggtattaggttagctctaatgaatagtgcttctgggtttgggaaaccagccactgcacttcctaccccgataacttctcccttgtttactggaagtttcccatctagtccacttctatatagtccagatggcactcaacggatcggtcgaattgacctagttccaccacttagtttggatggccacccaactacaaagtcctcaccaccaacatcaccattgaagtcaaggcagccatcagcacatgttcggtcattgtatgataaactgcagaatatgcctcaagttggtgtaatacacctggctcttcaaaatgattcaaccggttcagtattgagttggcagaatgatgtatttgtggttgctgaacctggagaacttgcagacagatttctgcaatctgtcaaaactagcttgtcaaccttgttgcgtgggcgtaatagaaagggtgcatattccttgtccaagatttcatgtttatctgagctggttgctgaatgtccatcttttgaaatcggtgggatacaccaccgctatataggtcgacaaacacaagtaatggaagataaccaagaaattggcgcatatatgtttaggaggacagtgcctgctgttcacatggcacctgaagatgttcgatggatggttggagcatggagggagagaatcattgtatgcagcggtaagtatggcctcgctcatggcctggtgaaggcattcatggattgtggcgccaaagcagtcatctcatcgtccatcgagcctccggattcccagacaatagtctaccatgggatggatgtcaatggaagcctagagaatgggaagtttgtcatcggggatgaagaagccgatgaatcggagcctgaacctgttagccctgtaagtgactgggaggacagcgacgtggagaaaggtggcaaccatgacatggatgatgaggagtacctggctcagttcatgtgcctgatgtacgacaaattgttccgtgagggtgtgactgtggatacagctctgcagcaagctctccgctcgcatcccaagttaaagtacagctgccacttacctcacgttttgtagttagggacattgacaaaccatacgggagtatagcaaaacggacatggacaacaggaaatgaataaggattgggtggattcatagtggggttatagaggtttatatcgtgttcgttgtgcaggcgtagtgacagagagtaccccctttctgaatctttgggcgagaaagcctatgtaaacctgtgtgctcatgagcagagtagttaagctgacgaataaaagcatgatgaagggcattgtaatctggatgtgcatttttgtttcagctaggagaatggacattcgcaatgttttggtgtcc

SEQ ID NO: 40226 - protein, 831 aa, Zea mays subsp. mays
LIRLTISQERRVSKAAARALAILGENENLRRAIRGRPVAKKGLRILSMDGGGMKGLATVQMLKQIEQGTGKRIHEMFDLICGTSTGGMLAMALGIKQMTLDQCEEIYTKLGKLVFAEPIPKDEAATWKEKLDQLFKSSSQSFRVVVHGSKHSADQFERLLKEMCADEDGDLLIESAVKGIPKVFAVSTLVSVMPAQPYIFRNYQYPPGTLEVSPGMAESPSISAIGTAVSGAPVGIKRGAFMGSCKHRVWEAIRASSAAPYYLDDFSVDANRWQDGAIVANNPTIFAIREAQLLWPDTRIDCLVSIGCGSVPTKSRRGGWRYLDTGQVLIESACSVERVEETLDTLIPMLPEMQYFRFNPVDERCGMELDETDPAIWLKLEAAADEYIQKNFLAFKNLCELLVPRYQEEEKSSDIYKSLSFSRLTSLNQGFSESNPTLGWRRVVLLVEASFSPDFGKKINHARSLESFCSQNGIRLALMNSASGFGKPATALPTPITSPLFTGSFPSSPLLYSPDGTQRIGRIDLVPPLSLDGHPTTKSSPPTSPLKSRQPSAHVRSLYDKLQNMPQVGVIHLALQNDSTGSVLSWQNDVFVVAEPGELADRFLQSVKTSLSTLLRGRNRKGAYSLSKISCLSELVAECPSFEIGGIHHRYIGRQTQVMEDNQEIGAYMFRRTVPAVHMAPEDVRWMVGAWRERIIVCSGKYGLAHGLVKAFMDCGAKAVISSSIEPPDSQTIVYHGMDVNGSLENGKFVIGDEEADESEPEPVSPVSDWEDSDVEKGGNHDMDDEEYLAQFMCLMYDKLFREGVTVDTALQQALRSHPKLKYSCHLPHVL

SEQ ID NO: 40227 - protein, 784 aa, Zea mays subsp. mays
MDGGGMKGLATVQMLKQIEQGTGKRIHEMFDLICGTSTGGMLAMALGIKQMTLDQCEEIYTKLGKLVFAEPIPKDEAATWKEKLDQLFKSSSQSFRVVVHGSKHSADQFERLLKEMCADEDGDLLIESAVKGIPKVFAVSTLVSVMPAQPYIFRNYQYPPGTLEVSPGMAESPSISAIGTAVSGAPVGIKRGAFMGSCKHRVWEAIRASSAAPYYLDDFSVDANRWQDGAIVANNPTIFAIREAQLLWPDTRIDCLVSIGCGSVPTKSRRGGWRYLDTGQVLIESACSVERVEETLDTLIPMLPEMQYFRFNPVDERCGMELDETDPAIWLKLEAAADEYIQKNFLAFKNLCELLVPRYQEEEKSSDIYKSLSFSRLTSLNQGFSESNPTLGWRRVVLLVEASFSPDFGKKINHARSLESFCSQNGIRLALMNSASGFGKPATALPTPITSPLFTGSFPSSPLLYSPDGTQRIGRIDLVPPLSLDGHPTTKSSPPTSPLKSRQPSAHVRSLYDKLQNMPQVGVIHLALQNDSTGSVLSWQNDVFVVAEPGELADRFLQSVKTSLSTLLRGRNRKGAYSLSKISCLSELVAECPSFEIGGIHHRYIGRQTQVMEDNQEIGAYMFRRTVPAVHMAPEDVRWMVGAWRERIIVCSGKYGLAHGLVKAFMDCGAKAVISSSIEPPDSQTIVYHGMDVNGSLENGKFVIGDEEADESEPEPVSPVSDWEDSDVEKGGNHDMDDEEYLAQFMCLMYDKLFREGVTVDTALQQALRSHPKLKYSCHLPHVL

SEQ ID NO: 40228 - protein, 779 aa, Zea mays subsp. mays
MKGLATVQMLKQIEQGTGKRIHEMFDLICGTSTGGMLAMALGIKQMTLDQCEEIYTKLGKLVFAEPIPKDEAATWKEKLDQLFKSSSQSFRVVVHGSKHSADQFERLLKEMCADEDGDLLIESAVKGIPKVFAVSTLVSVMPAQPYIFRNYQYPPGTLEVSPGMAESPSISAIGTAVSGAPVGIKRGAFMGSCKHRVWEAIRASSAAPYYLDDFSVDANRWQDGAIVANNPTIFAIREAQLLWPDTRIDCLVSIGCGSVPTKSRRGGWRYLDTGQVLIESACSVERVEETLDTLIPMLPEMQYFRFNPVDERCGMELDETDPAIWLKLEAAADEYIQKNFLAFKNLCELLVPRYQEEEKSSDIYKSLSFSRLTSLNQGFSESNPTLGWRRVVLLVEASFSPDFGKKINHARSLESFCSQNGIRLALMNSASGFGKPATALPTPITSPLFTGSFPSSPLLYSPDGTQRIGRIDLVPPLSLDGHPTTKSSPPTSPLKSRQPSAHVRSLYDKLQNMPQVGVIHLALQNDSTGSVLSWQNDVFVVAEPGELADRFLQSVKTSLSTLLRGRNRKGAYSLSKISCLSELVAECPSFEIGGIHHRYIGRQTQVMEDNQEIGAYMFRRTVPAVHMAPEDVRWMVGAWRERIIVCSGKYGLAHGLVKAFMDCGAKAVISSSIEPPDSQTIVYHGMDVNGSLENGKFVIGDEEADESEPEPVSPVSDWEDSDVEKGGNHDMDDEEYLAQFMCLMYDKLFREGVTVDTALQQALRSHPKLKYSCHLPHVL

SEQ ID NO: 40229 - DNA, 2045 bp, Zea mays subsp. mays
cccccccccccccccgccttcatcctcgctgccgtccccgcgctcgaggcaggcggaagcaagtgctcctccgtcgattgcttggggaggcgaatagggcctagtttccttggtaggcagggaggtgattctacaaggctggtgcaagatttgtatagattttttgatcaagttaacaaggaggaattcccacctgatgaaaagttaccagaatcattcagggattttcttttggagatgaaggataaccattatgatgctagaacatttgccgttaggttgaaagctacgatggaaaccatggataaggaggtaaagaggtcaaggttggcagaacagctgtataaacattatgctgcaacagctattcccaaaggaatccattgtttgtctctgcgccttacggatgaatactcctcaaatgctcatgcacggaaacagttaccgccaccagaactgttacctttgctttctgataattccctccaacattatattctagccagtgataatattcttgctgcttcagttgttgtcagctcaactgtacgatcttcctcactgcctgagaaagtagtctttcatgttattaccgataagaaaacatatcctgggatgcattcatggtttgctcttaattccatagctcctgcaatagttgaagtaaaaggtgttcaccagtttgactggctgacaagagaaaatgtcccggtactagaggctatagaaaaccatcgaggagtcagaaatcactatcatggggatcatggaacagtttccagtgcaagcgacaatcctagggtgcttgcttcaaagttgcaggctcggagccctaaatacatatccctgctgaaccatctccgtatttatttgcctgagctctttcccaacctcaacaaggtggtcttcctcgatgatgacattgttgttcagcgtgacttgtctcccctttgggcgatcaatcttgaagggaaggtgaatggagctgtggaaacatgcagaggggaagacagctgggtgatgtctaagcgtttcaggacatatttcaacttctcgcatcccgtgatagctcggagtcttgacccagatgaatgtgcttgggcatatggtatgaatatatttgatctggcagcttggagaaagacaaatatcagggatacatatcatttctggttgaaggagaatctaaaatctggtcttacactctggaaatttggtactttaccaccatcccttatagcatttaggggtcatgtgcatggcatagacccatcatggcacctgcttggcttaggataccaagacaagacagatattgagagtgtcaggagggctgcagtgatacattacaatggacagtgcaagccatggctagacattgcttttaagaacctacaaccattttggacaaagcatgtaaactactccaacgactttgttaaaaactgccatattttggagcctcggcatgtcaaggagtgacctgtaggctgtagcaaatacaggacacacggagggagtatagtttatgattcgtttgttggctggagaggctgactgttgctggatgataagtatactggttaatcaagaaatcaaccagcattcaatggaactgaccatcccctgtgaaaactgccattcaaatacctcaggagttttcatctgtaccataggggaacacaattcttaccatctgtatcatattggtgcatcattctttcctatactgtagctgcgcaaaaaggggctctgggtctgggctgatccttggtcgcagaataacatcagaaggctagaagattgaatgcttggttgatcaagacgaagaaaggaggcggatattatgaggtgggaagtttatatgctttacatccatccatttaattatttttacactctagcattgaaattttgttctggtagttttgtgattgcttcggtaggttcgagatgattgtagtagagatgccattgcttctggagtaacctacaggatattgttacgattgttgacatactaaagatgtgcagataattctttc

SEQ ID NO: 40230 - protein, 493 aa, Zea mays subsp. mays
PPPPPAFILAAVPALEAGGSKCSSVDCLGRRIGPSFLGRQGGDSTRLVQDLYRFFDQVNKEEFPPDEKLPESFRDFLLEMKDNHYDARTFAVRLKATMETMDKEVKRSRLAEQLYKHYAATAIPKGIHCLSLRLTDEYSSNAHARKQLPPPELLPLLSDNSLQHYILASDNILAASVVVSSTVRSSSLPEKVVFHVITDKKTYPGMHSWFALNSIAPAIVEVKGVHQFDWLTRENVPVLEAIENHRGVRNHYHGDHGTVSSASDNPRVLASKLQARSPKYISLLNHLRIYLPELFPNLNKVVFLDDDIVVQRDLSPLWAINLEGKVNGAVETCRGEDSWVMSKRFRTYFNFSHPVIARSLDPDECAWAYGMNIFDLAAWRKTNIRDTYHFWLKENLKSGLTLWKFGTLPPSLIAFRGHVHGIDPSWHLLGLGYQDKTDIESVRRAAVIHYNGQCKPWLDIAFKNLQPFWTKHVNYSNDFVKNCHILEPRHVKE

SEQ ID NO: 40231 - protein, 414 aa, Zea mays subsp. mays
MKDNHYDARTFAVRLKATMETMDKEVKRSRLAEQLYKHYAATAIPKGIHCLSLRLTDEYSSNAHARKQLPPPELLPLLSDNSLQHYILASDNILAASVVVSSTVRSSSLPEKVVFHVITDKKTYPGMHSWFALNSIAPAIVEVKGVHQFDWLTRENVPVLEAIENHRGVRNHYHGDHGTVSSASDNPRVLASKLQARSPKYISLLNHLRIYLPELFPNLNKVVFLDDDIVVQRDLSPLWAINLEGKVNGAVETCRGEDSWVMSKRFRTYFNFSHPVIARSLDPDECAWAYGMNIFDLAAWRKTNIRDTYHFWLKENLKSGLTLWKFGTLPPSLIAFRGHVHGIDPSWHLLGLGYQDKTDIESVRRAAVIHYNGQCKPWLDIAFKNLQPFWTKHVNYSNDFVKNCHILEPRHVKE

SEQ ID NO: 40232 - protein, 396 aa, Zea mays subsp. mays
METMDKEVKRSRLAEQLYKHYAATAIPKGIHCLSLRLTDEYSSNAHARKQLPPPELLPLLSDNSLQHYILASDNILAASVVVSSTVRSSSLPEKVVFHVITDKKTYPGMHSWFALNSIAPAIVEVKGVHQFDWLTRENVPVLEAIENHRGVRNHYHGDHGTVSSASDNPRVLASKLQARSPKYISLLNHLRIYLPELFPNLNKVVFLDDDIVVQRDLSPLWAINLEGKVNGAVETCRGEDSWVMSKRFRTYFNFSHPVIARSLDPDECAWAYGMNIFDLAAWRKTNIRDTYHFWLKENLKSGLTLWKFGTLPPSLIAFRGHVHGIDPSWHLLGLGYQDKTDIESVRRAAVIHYNGQCKPWLDIAFKNLQPFWTKHVNYSNDFVKNCHILEPRHVKE

SEQ ID NO: 40233 - DNA, 1118 bp, Zea mays subsp. mays
ctactataccttcctatacgttgttggagaatggggatggggtcgtccctccttcgggccgtcttcctcctgctggcctgttgttgctccttcgccagcggcggcgtgaacaactacaacaccagcgatgccgccgccaggcagctgcagtggggcaacgccagggccacatggtacggccagcccaacggtgctgggccctacgacaacggtacggcggcgcttgcgggttcaagaacgtcaaccagtacccgttcatggccatgacctcctgcggcaaccagcctctctaccgcgacggcaagggatgcggctcctgctacaagatcaggtgctccaagcacgccgcctgctccggccgcaccgagaccgtcgtcatcaccgacatgaactacaccccgggcgtcgcgccctaccacttcgacctcagcggcaccggccttcggcaggctggccaagcccggccgcaacgacgacctgcgccgcgccggcatcatcgacatccagttcgccagggtaccctgcgagttcccaggcctcaaggtcggcttccacgtcgaggaaggctccacccaggtctacttcgccgtgctggtcgagtacgagaacggcgacggcgacgtcgtccaggtcgacctcatggagaagcgcgcccgccgctggacgcccatgagccagtcatggggatccatctggcgcctcgactccaaccaccgcctgcagccacccttctccatccgcacccgcaccgactccggcaagacgctcgtcgcacgcgacgtcatcccactcaactggaggccaaacacattctacagatccatcgtccagtactcctcgtgaatcccacaattcatctcctacagctacagctgcagcctttttgtcgtcgccctcgcagtctcaggctcagctcgatcgggtagatcgatatgcaggcagcggtgcgtgctgtaataattataataatatatatatatatatatatatatatatatatatatataatatatataatatatactctccccgacccttcttaattatccttggtattcaactttcatcaagaaaaacattaaatatttataaaatataattactactgtttataagac

SEQ ID NO: 40234 - protein, 307 aa, Zea mays subsp. mays
TIPSYTLLENGDGVVPPSGRLPPAGLLLLLRQRRREQLQHQRCRRQAAAVGQRQGHMVRPAQRCWALRQRYGGACGFKNVNQYPFMAMTSCGNQPLYRDGKGCGSCYKIRCSKHAACSGRTETVVITDMNYTPGVAPYHFDLSGTGLRQAGQARPQRRPAPRRHHRHPVRQGTLRVPRPQGRLPRRGRLHPGLLRRAGRVRERRRRRRPGRPHGEARPPLDAHEPVMGIHLAPRLQPPPAATLLHPHPHRLRQDARRTRRHPTQLEAKHILQIHRPVLLVNPTIHLLQLQLQPFCRRPRSLRLSSIG

SEQ ID NO: 40235 - protein, 251 aa, Zea mays subsp. mays
MVRPAQRCWALRQRYGGACGFKNVNQYPFMAMTSCGNQPLYRDGKGCGSCYKIRCSKHAACSGRTETVVITDMNYTPGVAPYHFDLSGTGLRQAGQARPQRRPAPRRHHRHPVRQGTLRVPRPQGRLPRRGRLHPGLLRRAGRVRERRRRRRPGRPHGEARPPLDAHEPVMGIHLAPRLQPPPAATLLHPHPHRLRQDARRTRRHPTQLEAKHILQIHRPVLLVNPTIHLLQLQLQPFCRRPRSLRLSSIG

SEQ ID NO: 40236 - protein, 222 aa, Zea mays subsp. mays
MAMTSCGNQPLYRDGKGCGSCYKIRCSKHAACSGRTETVVITDMNYTPGVAPYHFDLSGTGLRQAGQARPQRRPAPRRHHRHPVRQGTLRVPRPQGRLPRRGRLHPGLLRRAGRVRERRRRRRPGRPHGEARPPLDAHEPVMGIHLAPRLQPPPAATLLHPHPHRLRQDARRTRRHPTQLEAKHILQIHRPVLLVNPTIHLLQLQLQPFCRRPRSLRLSSIG

SEQ ID NO: 40237 - DNA, 1872 bp, Zea mays subsp. mays
gcagcttaaaatggctgttgcttacactgcctcgcagcagttctgatgtttccgggaagggaaagggaaatgaacctgggcggtgcccgtccctcatggagctttgtgtggctagagtttgccaggatatcgacaggtattctacttttgcaatgctgccaagggatctcagccagcagattttcaatgaattagtaaattcaaaccgtcttacagaggcatcacttcaagtttttagggattgtgctctgcaggacattggcttaggggagtaccctggagtaaaggatgcttggatggaagtagtggcatctcaaaagcagtcattgttgtcggttgatatttcttgctctgaagtagctgatagtgggatagatcttcttagagattgctcaagcatgcaaagtttggcatgtaattactgtgatcaaatatccgaaagtggtctgggagtactgtcaggattgtcaaacctatcttctttaagcttcaagcgaagtaatgctgttactgctgaaggaatgagagcctttgcaaatttagttaacttactaaatctcgaccttgaaggttgcctaaagattcatggtggccttattcatttaaaagatctgacaaagctcgagtcattgaatatgagatattgcaattatattgcggattcagatatcaaatatttaacagatctgacaaatttgaaggaccttcaattgtcatgttgtaagatcacagatctgggggtgtcgtatatcagaggcttgcagaagctcactcacttgaacctagagggctgcccagtgactgctgcttgtttggaagctatttcaggattgtcttcattggtattgttgaacttgaaccgttgtggtatatacgatgatggctgtgaaaactttgaaggtcttaaaaggttgaaggttttaaacttggggtttaactatattacagatgcttgtttggtgcatctgaaagaattaatcagtttggagtctttgaacttggattcgtgcaagattggagatgatggtctatcacatctgaaaggtcttgtgctactgcaaagcttggagctttctgatactgaagttggaaacaatggactccagcatctatctggtcttcgtaatctgcaaagtattaatctctcatttactttggtcacggacattggtgtgaagaagatctctgtgttgaattcgctgaagtcagttaaccttgacaatcgccaaattactgatgttggcctggcagcacttataagtctcactaggctgactcatcttgacctttttggagcttgcataactgacaatggcacaaattgcttcagatattttaagaatcttgtttctcttgaagtctgtggtgggttcgttactgatgctggagtgaagaacatcaaggatctgaaggccctgacgttgctgaatctttctcaaaatgctaatctgacagacaaaaccttggagctgatctctggcctgactgctttgatcaacttgaacgtgtcaaactcacgggtgtccaatgctggtctcaaacacctgaatgacctgcacaacctgcgttcactgtatctagattccacccgggtgacggcaaacgagatgaggaagcttcgagaaacagtgctgcataatctgatcagcatgcggccagagtagtacccatttggcacctgctgtaaataatcattaggttcgagcaggttgttctgttggtaagtactgccttcgttctcgaatatttgtcgtccgctagttcatttttgaactagaccgcgataaataaaaaagaacggagggaatatcttgtaagaacctgaattgaaggcaggcatataattatataagttaacaatgtggtttagcg

SEQ ID NO: 40238 - protein, 553 aa, Zea mays subsp. mays
SLKWLLLTLPRSSSDVSGKGKGNEPGRCPSLMELCVARVCQDIDRYSTFAMLPRDLSQQIFNELVNSNRLTEASLQVFRDCALQDIGLGEYPGVKDAWMEVVASQKQSLLSVDISCSEVADSGIDLLRDCSSMQSLACNYCDQISESGLGVLSGLSNLSSLSFKRSNAVTAEGMRAFANLVNLLNLDLEGCLKIHGGLIHLKDLTKLESLNMRYCNYIADSDIKYLTDLTNLKDLQLSCCKITDLGVSYIRGLQKLTHLNLEGCPVTAACLEAISGLSSLVLLNLNRCGIYDDGCENFEGLKRLKVLNLGFNYITDACLVHLKELISLESLNLDSCKIGDDGLSHLKGLVLLQSLELSDTEVGNNGLQHLSGLRNLQSINLSFTLVTDIGVKKISVLNSLKSVNLDNRQITDVGLAALISLTRLTHLDLFGACITDNGTNCFRYFKNLVSLEVCGGFVTDAGVKNIKDLKALTLLNLSQNANLTDKTLELISGLTALINLNVSNSRVSNAGLKHLNDLHNLRSLYLDSTRVTANEMRKLRETVLHNLISMRPE

SEQ ID NO: 40239 - protein, 522 aa, Zea mays subsp. mays
MELCVARVCQDIDRYSTFAMLPRDLSQQIFNELVNSNRLTEASLQVFRDCALQDIGLGEYPGVKDAWMEVVASQKQSLLSVDISCSEVADSGIDLLRDCSSMQSLACNYCDQISESGLGVLSGLSNLSSLSFKRSNAVTAEGMRAFANLVNLLNLDLEGCLKIHGGLIHLKDLTKLESLNMRYCNYIADSDIKYLTDLTNLKDLQLSCCKITDLGVSYIRGLQKLTHLNLEGCPVTAACLEAISGLSSLVLLNLNRCGIYDDGCENFEGLKRLKVLNLGFNYITDACLVHLKELISLESLNLDSCKIGDDGLSHLKGLVLLQSLELSDTEVGNNGLQHLSGLRNLQSINLSFTLVTDIGVKKISVLNSLKSVNLDNRQITDVGLAALISLTRLTHLDLFGACITDNGTNCFRYFKNLVSLEVCGGFVTDAGVKNIKDLKALTLLNLSQNANLTDKTLELISGLTALINLNVSNSRVSNAGLKHLNDLHNLRSLYLDSTRVTANEMRKLRETVLHNLISMRPE

SEQ ID NO: 40240 - protein, 503 aa, Zea mays subsp. mays
MLPRDLSQQIFNELVNSNRLTEASLQVFRDCALQDIGLGEYPGVKDAWMEVVASQKQSLLSVDISCSEVADSGIDLLRDCSSMQSLACNYCDQISESGLGVLSGLSNLSSLSFKRSNAVTAEGMRAFANLVNLLNLDLEGCLKIHGGLIHLKDLTKLESLNMRYCNYIADSDIKYLTDLTNLKDLQLSCCKITDLGVSYIRGLQKLTHLNLEGCPVTAACLEAISGLSSLVLLNLNRCGIYDDGCENFEGLKRLKVLNLGFNYITDACLVHLKELISLESLNLDSCKIGDDGLSHLKGLVLLQSLELSDTEVGNNGLQHLSGLRNLQSINLSFTLVTDIGVKKISVLNSLKSVNLDNRQITDVGLAALISLTRLTHLDLFGACITDNGTNCFRYFKNLVSLEVCGGFVTDAGVKNIKDLKALTLLNLSQNANLTDKTLELISGLTALINLNVSNSRVSNAGLKHLNDLHNLRSLYLDSTRVTANEMRKLRETVLHNLISMRPE

SEQ ID NO: 40241 - DNA, 1387 bp, Zea mays subsp. mays
aatcaaatcccccagcaagtcagccccgccccgccccgcgccgacgcctctccccgatcccgatctgtgtgcctggctgcctgcaacctccgtgggatggaggcggcgcggcagcagcaggaggagtgcccgtgcggcggggccgaggccgctgaccagttcgagcggctgcacgacgcggtgctgctcgacgtcctcaatcgcatcggcgacgtcaaggcgctcggccgctgcgccctcgtctcgcgccgcttccacgcgctcgtgccgctcgtcgactccgtcttcgtccgcgtcgactgcgtcatccctgacgacccgccgccctcgtcctcctcctcctcctcctcctcttccgccgcaccaggcaccccgccgcggcaggcgccagccccaaccgcgcgcgggcgcggcgcgctcgcgcacatcgtgcgcgtcctgctcggcggcatcgccaggcccatccacgcgctcggccagatcctctcccccgccgccgcggccgtctcccggcgctccgaggcactgcccgcttccccgcgcgcgcccgtcgcggacgtctctcaccactccccctccgaggtgctccgctccttcaaggagctgcggcgccttcacatcgagctgcccacgggcgagctcggcattgacgacggtgtgctccttaagtggaaggccgacttcggctccaccctcgtcagctgcgtcatcctcggcgcctcgtcgatctcgtccaagccgccgacagggtacactcaggcggaatcggaaactgctacggccgccactcccgataccagtcgggagactgaagagccggggagcctacctgattctctttatacaaatggaggactcaagcttcgcgttgtctggaccatcagctccctgattgccgcgtcggcgaggcattacttgctgcagccgattatctggaatcacgaattgctggagagcttggacctgacagatgctgacgggcaaggggtgctcaccatggacaagaggcagctgcaggaactgcgggtgcggcccgtctttccgtcagggagctcgcaccgcaccctcatgccggctctcagtatgcgtctgcactacgcaccgctcattgagctgcctgggggaacgctgctgaagggtgcgacactagtggcgatcaaaccaagcgaagatgccttgagggagggccaaggggctggggctgcaggtcctgttggtacatgctggatttcagaggcctttgaggagccatatcggactgcggcaaaggtgcttctcaagagaagggcatattgtcttgaaatgaactcgttctgagcactagggggtttacttccacagagttctacccttctgacaggtgaaatgccactttacagttctaaat

SEQ ID NO: 40242 - protein, 438 aa, Zea mays subsp. mays
NQIPQQVSPAPPRADASPRSRSVCLAACNLRGMEAARQQQEECPCGGAEAADQFERLHDAVLLDVLNRIGDVKALGRCALVSRRFHALVPLVDSVFVRVDCVIPDDPPPSSSSSSSSSSAAPGTPPRQAPAPTARGRGALAHIVRVLLGGIARPIHALGQILSPAAAAVSRRSEALPASPRAPVADVSHHSPSEVLRSFKELRRLHIELPTGELGIDDGVLLKWKADFGSTLVSCVILGASSISSKPPTGYTQAESETATAATPDTSRETEEPGSLPDSLYTNGGLKLRVVWTISSLIAASARHYLLQPIIWNHELLESLDLTDADGQGVLTMDKRQLQELRVRPVFPSGSSHRTLMPALSMRLHYAPLIELPGGTLLKGATLVAIKPSEDALREGQGAGAAGPVGTCWISEAFEEPYRTAAKVLLKRRAYCLEMNSF

SEQ ID NO: 40243 - protein, 406 aa, Zea mays subsp. mays
MEAARQQQEECPCGGAEAADQFERLHDAVLLDVLNRIGDVKALGRCALVSRRFHALVPLVDSVFVRVDCVIPDDPPPSSSSSSSSSSAAPGTPPRQAPAPTARGRGALAHIVRVLLGGIARPIHALGQILSPAAAAVSRRSEALPASPRAPVADVSHHSPSEVLRSFKELRRLHIELPTGELGIDDGVLLKWKADFGSTLVSCVILGASSISSKPPTGYTQAESETATAATPDTSRETEEPGSLPDSLYTNGGLKLRVVWTISSLIAASARHYLLQPIIWNHELLESLDLTDADGQGVLTMDKRQLQELRVRPVFPSGSSHRTLMPALSMRLHYAPLIELPGGTLLKGATLVAIKPSEDALREGQGAGAAGPVGTCWISEAFEEPYRTAAKVLLKRRAYCLEMNSF

SEQ ID NO: 40244 - protein, 296 aa, Zea mays subsp. mays
IKSPSKSAPPRPAPTPLPDPDLCAWLPATSVGWRRRGSSRRSARAAGPRPLTSSSGCTTRCCSTSSIASATSRRSAAAPSSRAASTRSCRSSTPSSSASTASSLTTRRPRPPPPPPPLPPHQAPRRGRRQPQPRAGAARSRTSCASCSAASPGPSTRSARSSPPPPRPSPGAPRHCPLPRARPSRTSLTTPPPRCSAPSRSCGAFTSSCPRASSALTTVCSLSGRPTSAPPSSAASSSAPRRSRPSRRQGTLRRNRKLLRPPLPIPVGRLKSRGAYLILFIQMEDSSFALSGPSAP

SEQ ID NO: 40245 - DNA, 1303 bp, Zea mays subsp. mays
aatgctgctgttccctcccccgtttcaatgccttggcttcaagtgaccgtggtaaaagaaaatttgacgccacaacacacgtcggttgcttgtttacttgctgtggctttaattcgactgcagctgctgcggcttttattttgtcattagagagcagccgagcgccaccgtccatcacgagcttccatgttcaagccctgctctctgctcttataataaataaaagtcggcacatgattgcatcgcccccccgcctacagactccaaacaaaatcaagactgagagcaaaaccgtctcatctgatctagcgagcactccagctttctgcaatggcgattcaccgtctgatgcttcccatttctatccttctgatgagctcactctccggtacgccgccgcccctcgatggcacgcgcgataattaatcctgatccttccttacgatgccgtgtttgctgccttgtgcaggggccgtgtcgacgacgttcacgctggccaactcctgcggctacacggtgtggcctgggctgctgtcgagcgcgggctcggcgccgctgcccaccacgggcttcgcgctggcaccgggggagtcgcgcgtcgtggacgcgcccgcggcgtggtccggccgcatatggggccgcacgcgctgcgccgcggacaaccaggcctccggccggttcgcctgcgccacgggcgagtgcggctcgggggcggtggagtgcgcgggcggcggggccgcgccgcccaccacgctcgcggagttcacgctggacggcgccggcgggaacgacttctacgacgtgagcctggtggacgggtcgaacctgccgatggccgtggtgccgcagggcggcgccgggaccagctgcggcgccacgggctgcctggcggacctgaacgggccgtgccccgccgacctcagggtggtgggctccgacggcgccggcatcgcctgcaagagcgcgtgcggggcgtacgggcggccccaggactgctgcagcggcgactacggcacccccgcgacgtgccagccgtccgccagctcgcagttcttcaagaacgcgtgcccgcgcgcctacagttacgcctacgatgacgccacctccaccttcacctgcacgtccggcaccgccagttacctcgtcacgttctgcccaagcatctccaggtaacaagatcacagttgacctcacctacctagctagtggagatgcgagttgatcattttggcatgaataatggaacgaatgatcgatcagagatgatttcatgcccaagtaaacgttgcatgcaaactcacct

SEQ ID NO: 40246 - protein, 242 aa, Zea mays subsp. mays
MPCLLPCAGAVSTTFTLANSCGYTVWPGLLSSAGSAPLPTTGFALAPGESRVVDAPAAWSGRIWGRTRCAADNQASGRFACATGECGSGAVECAGGGAAPPTTLAEFTLDGAGGNDFYDVSLVDGSNLPMAVVPQGGAGTSCGATGCLADLNGPCPADLRVVGSDGAGIACKSACGAYGRPQDCCSGDYGTPATCQPSASSQFFKNACPRAYSYAYDDATSTFTCTSGTASYLVTFCPSISR

SEQ ID NO: 40247 - protein, 154 aa, Zea mays subsp. mays
MGPHALRRGQPGLRPVRLRHGRVRLGGGGVRGRRGRAAHHARGVHAGRRRRERLLRREPGGRVEPADGRGAAGRRRDQLRRHGLPGGPERAVPRRPQGGGLRRRRHRLQERVRGVRAAPGLLQRRLRHPRDVPAVRQLAVLQERVPARLQLRLR

SEQ ID NO: 40248 - protein, 139 aa, Zea mays subsp. mays
CCCSLPRFNALASSDRGKRKFDATTHVGCLFTCCGFNSTAAAAAFILSLESSRAPPSITSFHVQALLSALIINKSRHMIASPPRLQTPNKIKTESKTVSSDLASTPAFCNGDSPSDASHFYPSDELTLRYAAAPRWHAR

SEQ ID NO: 40249 - DNA, 1641 bp, Zea mays subsp. mays
ggagacttgtctctgctttgattgaagaagacgcttgatcgaaaattcccttagatttcgtaaatagggttttacagaaggtgagattacacagagatcggatttgcgaaaaaaaaaaatgggaagtccaaagaagaacgagaacaaaggcttcttcgccgccatgacttctggcttctccatgttcggtaccgccgtgtcgagatccgttaacggcgtgcaaggtaatgaaggagttgaggtcataaatccagaaggtggcaaggaagatgctgaagaggaagctcagaaaggaaggtggaaggacgaggaacgagatagttactggaagatgatgcagaaatatataggttcggatattacgtcaatggtgactcttcctgttgttatatttgagcctatgactatgctccagaagatggctgagataatggagtattctcatttgttggatcaagcagatgaatgcgaagatccatacttgcgtttagtatatgcttcatcatgggctatatctgtttactatgccttccaacgaacttggaagcctttcaatcctattcttggggagacatatgagatggtcaaccatggtgggatttcttttatttctgagcaggttaaccatcatccaccaatgagtgctggtcatgccgagaacgagcacttcatttacgacatcacatcaaagttgaaaactaaacttttgggtaactctgttgatgtttaccctgtgggaagaacgcgtgtaaccctcaagaaagatggtgtggttctggatttggtgccgcctctcactaagattcacaatctaatatttggacgaacctgggttgactcacctggggaaatggtcatgacaaatttaaccactggagacaaagttgtgctttatttccagccatgtggctggttcggttctggccgctatgaagttgatggctacgtttacagcgcagctgaagaaccgaaaatcatgatgacaggaaaatggaatgagaaaatgagctaccaaccttgtgatgccgaaggggaaccccttccaggaacagagctgaaagaggtgtggcatttggctgatgtccccaaaaacgacaaatttcagtacactcactttgctcacaagataaacagcttcgacacagcgcctgctaagctcttggcttcagactcacgtatccgtcctgatagatattcccttgagcagggtgacctttctaaagctggttccgagaaacacagccttgaggagagacaaagggccgaaaagaggaccagagagacaaagggacaaaagttcactccaagatggttcgatctaacggatgagatcacacctactccatggggagatattgaagtataccaatacaacgggaagtacaatgaacaccgagacacggcagagagctcaagtagtgcctccaacgaaacggacctcaaatcgatcgagtttaatccttggcaatatggtaatatctcaaccgaatgaagtaactcttatagtttaatttgttatctctatatacgaatgctgtgattcatgttcacttgaaagtgagtcccatgttgtttttaactttgtttcagactgaaaaatctgattatgtagtttgagtgataaaacataagttttgtgtt

SEQ ID NO: 40250 - protein, 457 aa, Zea mays subsp. mays
MGSPKKNENKGFFAAMTSGFSMFGTAVSRSVNGVQGNEGVEVINPEGGKEDAEEEAQKGRWKDEERDSYWKMMQKYIGSDITSMVTLPVVIFEPMTMLQKMAEIMEYSHLLDQADECEDPYLRLVYASSWAISVYYAFQRTWKPFNPILGETYEMVNHGGISFISEQVNHHPPMSAGHAENEHFIYDITSKLKTKLLGNSVDVYPVGRTRVTLKKDGVVLDLVPPLTKIHNLIFGRTWVDSPGEMVMTNLTTGDKVVLYFQPCGWFGSGRYEVDGYVYSAAEEPKIMMTGKWNEKMSYQPCDAEGEPLPGTELKEVWHLADVPKNDKFQYTHFAHKINSFDTAPAKLLASDSRIRPDRYSLEQGDLSKAGSEKHSLEERQRAEKRTRETKGQKFTPRWFDLTDEITPTPWGDIEVYQYNGKYNEHRDTAESSSSASNETDLKSIEFNPWQYGNISTE

SEQ ID NO: 40251 - protein, 442 aa, Zea mays subsp. mays
MTSGFSMFGTAVSRSVNGVQGNEGVEVINPEGGKEDAEEEAQKGRWKDEERDSYWKMMQKYIGSDITSMVTLPVVIFEPMTMLQKMAEIMEYSHLLDQADECEDPYLRLVYASSWAISVYYAFQRTWKPFNPILGETYEMVNHGGISFISEQVNHHPPMSAGHAENEHFIYDITSKLKTKLLGNSVDVYPVGRTRVTLKKDGVVLDLVPPLTKIHNLIFGRTWVDSPGEMVMTNLTTGDKVVLYFQPCGWFGSGRYEVDGYVYSAAEEPKIMMTGKWNEKMSYQPCDAEGEPLPGTELKEVWHLADVPKNDKFQYTHFAHKINSFDTAPAKLLASDSRIRPDRYSLEQGDLSKAGSEKHSLEERQRAEKRTRETKGQKFTPRWFDLTDEITPTPWGDIEVYQYNGKYNEHRDTAESSSSASNETDLKSIEFNPWQYGNISTE

SEQ ID NO: 40252 - protein, 436 aa, Zea mays subsp. mays
MFGTAVSRSVNGVQGNEGVEVINPEGGKEDAEEEAQKGRWKDEERDSYWKMMQKYIGSDITSMVTLPVVIFEPMTMLQKMAEIMEYSHLLDQADECEDPYLRLVYASSWAISVYYAFQRTWKPFNPILGETYEMVNHGGISFISEQVNHHPPMSAGHAENEHFIYDITSKLKTKLLGNSVDVYPVGRTRVTLKKDGVVLDLVPPLTKIHNLIFGRTWVDSPGEMVMTNLTTGDKVVLYFQPCGWFGSGRYEVDGYVYSAAEEPKIMMTGKWNEKMSYQPCDAEGEPLPGTELKEVWHLADVPKNDKFQYTHFAHKINSFDTAPAKLLASDSRIRPDRYSLEQGDLSKAGSEKHSLEERQRAEKRTRETKGQKFTPRWFDLTDEITPTPWGDIEVYQYNGKYNEHRDTAESSSSASNETDLKSIEFNPWQYGNISTE
